United States Patent Application Publication US 2026/0275333 A1 - sequence listing, part 6

SEQ ID NO: 3045 - RNA, 64444167 nt, Homo sapiens (residues 10,740,696-12,888,834 of 64,444,167)
  source 1..64444167: mol_type = mRNA
ggcttcactaattcccacttagaactacaagcattaaaagtcacagtatctaagacaagtgagcttttagctcctggttgcaataggggaatttataagaatatttagaagtgatccaggttcctttctttccctctccttaaagcacataaactctggtcattttcacaggtttttgctaattaataccaccactgtggaaatgggggctgttctacaaacaagctgcaacaaatgggatttttattgctggtggaaaagtctggggaataattagcagatctatggagatcccttgactccgggcatctgcatggtaatggccaaccctggagatcactcagggaaatggggtcggactttccaccttagggcacatttatattgtcagttacagccttcaaactgcagtgggacaaatgtgggaaaatattttgtgaaatactagacaaatgaacctggtgttgaccaatctcaactaggaaaactggctctgctttgctaagtgctgtacagcagccaagactcgcaaatgaaatattttgatatcttgttaaacttgagtccccagagggaggcacacacacatacacatgatggactcgggtcctcaaggtggaaggccagagaagattagagaaacgactggctcgaggggggaagagagaaccgtgaggtcatctggtccagaggtttgtactcaaaggatccttggagagaatccagggggattctgtgaacttggatgggaaaataattacatttttgtgttccctaacgtctaattgaaatatactctttctttctatttcaaatgaggacaaaaaatcataagaacatcagctatacccatgatattgacacagtggaaatcaaagatgtctttatatcatattatagtgtagatatctcaagacatcatctctgcccatcacttctgtgaaattatggtagttactgaacccactgctagatcttcttctttagtgtgctactaaagaaaatacatatattactatatcacacatttaaaactattttgagtactgtgttttctgtcattaggtttttgagtaactttatatattttatctacttatgagcaaaaagcattattctgagaacaggacatagtctttatcacactgccaagaggtccataatacatggtataagatccccttctcgcccagtcttctctatttacagctgaggaaatcgaggcagcgctggcaagtggcagagaaaaagctggaaccccaaggtgctgtctctaagtctgttctcaccattcttctgcaggagaagaaagtacccttggtaaaaacaacatggaatactttcttaaaacaatgtttcaacgtgtaggaatcagggatgataagtaattcccgaggctagtcttagctagagaatttgttttcaaattcaaatatacttttctaccttcattttaaagtgtggacattgccaagttaagtgaatgttgttattttaaaaaattaacatggaggcccaattatgtgggttatatttaaacagttccacagaatatatttcatgttattttctacacctatagcagcaagtttatctcctgcatatttaaggcaatttgaaatgaaatttttaatctgtgaacaccccaactgtgagccttaggaagctgggtgtcagaccaagctaggttacgatgagtatggataatttaaattatcaacttcatgtattatctagaatggcatgcattgattatatacatgtgtacatgtacttactagtggaaaagacaagaagcacattcatttcaagtagttgatgtctctcatgaaagcattagctgattctacttccttggtgtggacataaagatgaaagaaattcaaataaattatctcttaatggttaaattgatggcacattttctcaaagcaattgatcctgacacattgtggttttctaaatttcataatttgtggaattgtaaaactgtagaatggaaagggatcttatatgtcatctaattcagtaattctcaaactttagatttctcgaccattctcttttttctttttcagcaatttatcagatgggacatagataggggcacatttattcatctattttggctttaatgtttatgttttagttttgaaataatatcagacttataaaaaagtcacaaatattgtataatttcagtatgccctcatccagactcttcaaatagtaatatttcttacaattacagtacagtgatcaaaatgataaaattaacgttgatacgatcctattgtctaagctatagtctttacttagattttacattatttcactaatatccttttcttgatccagaatccaatgtaggattgtatgttgcatttagttgtcacctctacttattctcctttaatctgagacattcctcagtctttctttgtgttttgtgacattgaacgttaaacattttgccagtgattttgtgaaagtttcctcattttaggtctgtctgatgtttttcatgattcttctcaggttatgcacttttagtaggaataccatggaagagatattgtgtccttctcagtgcagcctattaggaggcatgtggtgttgatatcttatcactggtgatattaactttgatcacttggttaacggagtgtccgctagtttctccactataaaattacacatctcctgttgtaatcagtaagtattctgtggggatatgctttgagactatataaaaatcttgtttcccctcttactttcacctgctaattttaatcaatgatcttgcttgaaacaactgttaggattgtatgaaaaagtttgttaaagagaagattcaatatttaacatgaaatccacaattttaattttcttgagattcagcttggttttttataattacttcattaccttgcttaatttctttctctcattatttatttacattctcattataaatgccatgagaatgtgacagttacgaatgttcacacaatctaaatgtccttgcaagataagtgtggtaattcctgaaggttctgatcggatttcaagtatttaacaacacagaaaaaggcacaatgtgaattattttatgcatgaatgtaatttaatcacatcccatgagtacagaagagcatagttatttataccttcaaggcttcaaacacctaataaatacacacaatattgaaaggaaaccttcatgttacacaggtgtcaaaatcatacatttcatgttgtactctaagactcatcaaagtgagctgaagccttgaggacagagagggagaattgtgatctgaaaatttcttggattaacatttgactatcgacttcagtatttttatagctcaagtctaggtacacgtaagtaagcagaaaaataaaactcctacctcggattttacatgctgctttggaaggtaatataagactctgagatatatctgggcctccacaaaaagagaaaagaggcttgcctgcttgttcttggaatgcatggggccagctggtagagacctatctacagcaatccccaaaatgtgaataagaatcagcttctggctgagcatggtggctcacgcctgtaatcccagcactttgggaggctgaggcaggtggattgctttgagctcaggagtttgaggccagcctgggcaacatggtgaaagcctgtctctactaaagacacaaaaattagtggggtgtggtggcacgcttgtggtcccagctactcaggaggctgaggtgggagaatcacttgaactccagaggccgaggttgcagagtgatcccctgtctaaaaaaaaaaaaaaaaaaaaaaagaatcagcttcctactagactgattttttgtttcagggccaactcttaaaatatagacatatgaaataaagatgttgctataggagggatcatttttcttttccaagataccaaacaaaacaatttcgtaaacctttagctagttcctgcttcacttcatcagaagccattgctgtttctaagccagttcttagaaaactcaagtgctggaaatgtaacacctccatcacctctcatcccttgttactgtcaaaactctttcttaatgcccacctgaggacctgcatcaataaaaacccaatctttcaaaatctaatcataatagtaatgccaaaacttgtttcttgaccaacccttaccaacaatgtaatcagctcctcagaggaagatttgaaaatacgatcatcaagtatgttgtggacacaatgctgagagggaacacaatttctagataagagacttaaattgactttaagattgacttaaaattcaaaaggccatgaccgctgagtttgggccaaatctaacaagtggaaatgaacagggctgtctgtaaaattgttcacttgggtcagaaatgatttgctggcacaagtacaggtcagagagggagcaaatggaaaaacaaaataaaacgaaagaaaaccttgggaattttcactgcaaataaactaaagctagagatgcagagtggctggaaatgtaactattcccacccacttccgtgtggggcccttgaatgcagaatttattcaactgaaagtgaagaccttgaccgaaatatcgagggccttgagcttattttcttctgtatgaccatctttcagaaacaaatgaattctttcaaaacaaaaaaaaaaaaagaaagaagaaaaaaaaaggagaaacaaaagtcaaagaagattttgaaaaaagtaataactgaccaatttggcattaaaaaacaaatattttgatgcatatgagaattaaacttgtataatgcaaaaccatctcaagtgttctgggtatagaaaattatttaatgaggtcaaaatagagaggtagatgcagtagttttcatcaaattcacatttgcaaatattcttttgatacataatcccctgtgttcagtgccagaaaaatggtgctaattttggaataaaatcagaccttgctccggattcacaaaatattcatcataagaatgaagaatgagagatgagaaaaataaatgtgagttgagagaaagtaaggaaagctttctgcagaacagaaagagaacacatttcctgcatcctgagcctctctcctgtttttattttccttgtaaatttcccacatttcagaatgtaggttgatgtagccattatggaaaacagtttgaaattaaaaatagaactaccgtacaacccagcaatccctcttctgggtatgtacctgagggacatgaagtcactacctcgtaaagatatctgcactcccgtgtttattgcaggactagtcacaatagccaagacatggaaacacctaaatgttcatcgactgataaatggatacagaaaatgtggtacatacataatacaatggaatattattcagccttaaaaaagagatcctgccatttgccataacatgggcggacctggagaacattatgctaagtgaaataagccaggcacagaaaaatactgcatgatctcacttatatgtggaatatattttttaaaagaggtcaagtacacagaagaaaactgtggttaccatggggtaaaagaagggtggagagcaaatgggggaacataggtcaaagggaacaaaattgcagatatataggatgaacaaatttatagattgaatgtacaacatgaggactaaagttaatacaattatattgaattagagatctttgttaaataagttgatttcagttgctcttgtcaccaaaaaaactatgtgagataatagatatgttaatttgctttactatagtaaccattttattatctatatgtgtcccataacatcatgttgtaaaactcaaatatgcacaataaaatttattttttttaaatcccacctttcattaaggccacccaaggatttccctgtaagctcagggaagaaaatcaattctgtggatgtactgtgagacagccaaggagcaggccctagggaggaagcctgccagtggacaagcagatacaggtgtctacagctgaagcatttacctagaaacaggttgcatattttctgatcactttgaatttttgttttgaaggccctgaagaattaattaggtgtcagggccttttgtctgctatgtccagtccctgaaagaactgaagccatgaagccacttagaaccagcacatcaactgttttctagatgatcagaaacctccagagcttttcacttcagctcactgtatgcttttaagcaacagagatttaaaagtcttgagattataggaccataaaaatacacatttacatgtggtcacatgtaaggtttaagactgggagtgaaccataaagggaatgctttgtaccagtaccaaaatacaagttcaatgaatgacgcagcagctctgagaggaacataaggaaaacacccaagccggagtctctcacaagcttgaatgtgtgttctggagctgaaggatgcacggttgttaagcccctgttcttttccgtaagttccttctggggccttctgcagccatataaaatgcagctagtaaaacaggtttccgtgggagggagacctgggagtgcctgaatttccttctttttttgctgaacaattaagcaacaaaagcagtctgggaaaatagaagacatttcagagctggtcatgcattcaacacatgccaaggaagggaggttttgtcgctgtttgactcctaatcctgtatttacttgttggctaaatggaattaattcatttagttttgcagagtgttaggctttcttctctccgttaagtttctcttttcttttctcaaaaggaaatagcaagcttatcttagaaggttgaaggcaatttggcaatctgttctttggttagaggaaattatcctattttaataaacaaattattcaattaattcaacatgaaaaaatagtttggcacttactgtggggcgggccttgtactaggacatgggatacaccaatgaacaagacattcaaagatgtagataaacgaataggcaattatggtcaatggacatgaggttaatgcaagggaaggcattaggaacacttgggtcttattcacttttggggacctgacgaaggtttcttgcagaaatctaatctgagatccaaggagtaagtcaaagtttattcagtgacagggagcaggaattaagtttaattatttttccaggcatatgtgcagaacggtggggtgggaggcctgaatgtgggtgagcactcactatgcatgaagaactaaaagaatattgaaatgactgacatatgcactggtgagagatggtcaaataaagtaggtaggagccagattcctcaggtcattgttggtgttgttcagcatttagaatgtttttcttgctttgtcattgtttttaattgacacttaataactgtacatatttatggggtacagtatgttatttccatacatgtatacaatatgtaacgatccaatcagggtaattagcacgtccatcgcctcaaaccttgatcatttatttgtgttgggaagcttcaaaatccactcttctagctatttgaaaatatataattaattattgttaattacagacactttatagtgctatagaacactagcactttttcctcctctctcactatacttttgtatctgttagcatttgaattcttactccaagaacaaaggggtaaccacaggggaaagaatcactcagattttgaaatttctctttgtctacattgtagaaaatgatttggaggtaggtaagaccagagaattgagcaaggggaggatgaaaggtgaaagaagacagcgctcttcctatcttggtgggcttggggctgggtggtactgctgagtttgtcctttgcctggtgtcaaccatcaccatctatctcaatgataccccagtggactgtaaggacccattatgcctctgtcaaatatgaaatatctagaccttttcaagtgtctgttttgtttcctcaaaccatacccatttggaggttaatatgttgttgggtaaaataattaaacttagctccaagtacagagtgaaagggaaattttttgttctatcatgttgggacttatataatttgatgtctgtttcatcctcaccttttgagttagtctttgccctggagtctgagagagttttctcaaaggaaatctacaaaaatatttgtggatttagaaacactaaagggaagagaaaattgttctgtagttcacgttcctgacatttcagaagctcatgatcccaggctctcaggttacaaaaagatttttttcttctaaacatgttcccttaaggtgtcaatggttgataatgcgcccaataaacattaatgcatcaaacaagtacaaaccctttttgacacaggaacagagctgaaactgtgggaccttaagcattagcaggcatgggtgtgttttggagagggaaaagtcctcctgagatcacatgggtttctgggtagagagggagagctagatttatcctgagtcttgtgaattatctgttgtgtgactgagttttgtgggaattaagccaaatcaaaataaataatgcatgtaatgtgtttagcacactccccagtgtgtggtgggcatccagtaagcattggctattattaagagctatggagtctgggccacatgctacaagacattcagcagtgaaactgttttgggttgctgtagagagtagggatgtatgttgcatgggaacagtcagggagggaggtccattttcagcatcaccccagggtcagatgtcatgacacagacagagggaccgagagagagagagcgagcatgagcccctcctgttattgtcctaaaccctcattcactgagggcagcctctactccattaccgcagtaaaggttctgctgtgaagccagatatgcagcagccctccctccagcaccttgctttcacaggatctgtttcttgccatgcatgccatagattcacagagcattttataaattgaaaaaggctattcaatggcaaggtattactattaccgtgtatccaactggtgatgttatccctatagacaggatgtgttagggacaccctgggtctcttcctccccactccttcccattttgaagtacacatttatgtttatcaattgttactatatccagagcccagtcttctcctatttctcctacttgttccttgccaacaaatttcattaaggctcttctgggagacccaaaaagtggtgggaagaaaatgcaattctgacgtgcaaaggtgggatgatggaaaatcaggaatctgttgtagaattttaatttaaatataccattgtcgttaaatacaccaatggcgaggggctgagtcattgagcactagaattccacatgcatttgataatgatggtttctagtcggtaattacgtggctgtggcccccatgtttttcttggagtctttgtgatactccctcaatttgctcttcctgtactcacttcttgtctttcattcttgtccttgaatattttgggtatataggacaaaaataagaatgcaagcaggcacccaccagcatgacaaaaatgaaatagatggaagatgcttactgttggcaaggaagtgggacaactggaactcacatgcactgctggtgggagtatacattgacacaacctttttggaaaaatggttgctagtatctactaaagctgaaagtagctatgctattgttcaaccagcccacttgttggtgtgtgcttaacagaacgcagaaaacagtcaccaaaagacacgtagtagaatgttcaaactcctcataactggaattactctaatgcccatcagcaatagattggataaataaattctggcatgtttgcaaaaatggggtgctatacagtattgagagtgcatgatataattctaaattacatgcatcaatatagatgaatcttatttataaacataaatgttgagcaaaagaagccagatacatgcacaaaaactcacactctatgactgtagtttgtataacaaacaccactgatttgtgctgttagaagtcaggatagcaggtcgaatgtggtggctcacacctgtaatcccagcactttgggaggctgagtcatgcagattgcttgaggccaggagttcgagaccagcctggccaacatgacaaaaccccgtctctactgaaaatacaaaaattagctgggtgtggtggcaggtgcctgtaatcccagctacttgggaggttgaggcacaagaatcgcttgaacctgggaggcggagtttgcggtgggcagagatggcaccactgcactccagcctgggcaatagagtgaggcataatctcaaaacaaacaaacaaacaaacaaacaaacaaacaaacaaaaaatagaagtcaggatactaattagtattggtgaccagaagaaagcattcccggggacttcttgggtactagtcaggttctgtttcttagtctgggtgctggttttaagattgtgttcagtttgtgaaagttcattggactgtatgcttaagggtactttttgtatattgtattttaataaaaagtttttttttaattggcaagattaaatacattatttttgtcatcttttcagccctggacaccattagtaatttttatggaacaaagctagcagcagaaccaaccagctacagtccttaaatttatacatttcatacagaaaatagtactttcccatcattatttcagaatggcttaatcaatatcttcatctaaaagatgaagccagaaatgtcagctacacatagctgttgcaaatattaactagcatcttgtatatagatatagttcctggcactggcaggtattcagtatggtggcaatcctgaacccctgattccacttggaatggaagtcaggatagcagcatttctgtgctagtcattgctcataagctcatgatatgctttatatattttatcccatatcaaccctatggggtaaaaattatttccatcgttacccagataaggtgactgagggtcagagagccggatgggtaaggtcacaaagctgtaggaggcacactgatatctgaactcaggcctcttccaaagttcattccacaggaacacgccgccacccaattaagtagaaaactacccgagttgtacttcaatttctctaaacatagtggtttccttctgaggtagaaatcatctgctcagctggtttcagagtaccattttccttgttgagttgacttagtggtaaaagaaattttgaatgaagtgggcagagagatccggagaacagcagggaagtctccaaggaccttgtgattttgggctctcactgtgggagttgttatgctttgcagtaattgcatattggatacataattctaattttcatggagtgggctgcccggaccctccaacttttagtgcttattgacatatttttatacattttatcagtttaacaactaaaacacactttcctcttgctcaagagtttcccaggagtatactagcaaaagtgggagatgcaaatttgtgaatatccactttttcctccactgaaaggaaaataataaaaagtccaggtactggccaaaaataactattactaaagcagacccagaagcccagcccaggcccttgcaaccaagatatgatgtggtctgccctctttgcaagttgaactgtgccaacatctgttggcttgttgcctctgacagctacatagagaaagacatgggaaagaggtgtggcagaagaaccaatatatgtggtgccaagcatcattgtagatatctgcaagttgtatatcatgacttaatttagaaataaaaactgaggtcacagagggtaagaaacttgcttaatgccacagagatgttaaatggcagaatcaaagtgcagtcctatcgcaagaattggcaaaccttttctataaaggggcagataataaatatttcagctttgtgggtcatatggtctttgttgcaattactagtctcttctattgtagtgtgaaagcagccacagataatatagaggaaagcaggtgtggttgtattctaataaaactatttatgaacactgaaatttcaaatttcctgtaatttttgtgtcttaaaatattatacttaaaaattatatttaactctttaaaaaatgtaaagacaatttttagcttacaggtatacagaaacaggcggtaagacatatttggctcataggccatagtttagctgaccctttgttttatctgattctaaagctcacgcaagctgttttgacttagcaggttgtttaatctaatgttctttggaataaaaacctccctgccaagtagtacttggttttatgctcaacatgctttgactgttgaaaagagacctttggcacacattgaagggatggtgagtatatatttgtttgtgtttgtgtgtgtgagagagggggatagagggagggagggaaagaaggagggagggagagagagagagaaagaaagaaagaagggaggcgcaaagaacagacaacaaaaagaattaactcaattttttatcttataccaacaaacagactttggtgatattgacttttccgttttcaaaatctaagatgtcttgctgttttctaaaataaaagtgacttaatgtcaacattaaaatttatcaaattttatcaaattgggagaattttgtcatctgcttgacatttggtaaatgaaattcaatggtgcctaattaaatattgtgaatgttaatactgaatcagggaggtttgcaaatgatatcaactgaggtttgtagatagtattgactgaggtcctccgtgttatctctgcttcattaggtgatggagatgccaatccatggaatcaggtggcacagctatgttggtagctatagcagaagtcttcttggcaaagattcctccagggaaggaaggtaccattggagaaccatgcatgaagacagggaagaaatgattggaatcatgaaacattaaactggaaggaagccctaggcaaacctaactcatgggaaaacagacacccacatgttacccagtttagtaccaaaaccaaggctggtatttgcataaatatacttttcttctctatctaatatcaaggccttcttagtattgttaataggccttaagcttggtttgtctacatagaaatcaaaataacaatgtcaacccatgaaagaattaaaagaagtcccaaacagttctgatttcctccaatgtgactatttctgatatattataaaataacagaaatcaaactcaaagaatgaactttttgtctctattttgctaataatggttaaagtaaatggatggtctttctagtctttcccaaaggcccctagattaattgttagtgacattgctaggaaactcccatgaaatcttgtaggtccatggaaaccatgcatcagactctaacatattgtgtagatcacatgctatcatgtgaaaatgttctgttccaaagtcccctggaatttgggatgtatttttcctacagaacaatgttccaagcaaaggtctattggattcctcaagtggctgactgcaacgaatgtgctcagaagctgctgaggcttaaactttcagcccttcgagaggcagctcaagagattgggaaactggaagaggctctgctatatcctgtcctccttttgggagatcttggcagcccttgcgtagagagagggaggagggttggtgggcatgggggtttggtggggaagctaaggtcctcctttggaaacaacggaggaagcctccatgttaaaggggaaaggaggagacaggaaacctccattaaattgtttataagttgaattgtttctaaagccggaactgacaactgtgtttttacaaagtagaaaaggatgcaacgagttccacagccctcattcaggcatatacaatgcttaagaagatcagagtgcagttttctttgggcaggtaggtttcgaaaaaaaaaaaaaaaagagtgttgacacagtgtataaattcttccaatttgaaaattattgagggttattactgatgccatttgaacaggaccataacattcatggatggtggaatggctcaaatcactgcctaagcaagcaattattttgtttttgcttctgcagttagacaaggaagaatgttttgcattctatcagctgggcttttattgtttttcatgttaggacaaatgttctttgagaggtggggtcttgtttgaggaaatgtcaagctgtccagtttagatttattggtgattgcggcaggtgccaaatgtttcaagaagttggcgtatgcactttttttttctcccctggcagactttcctggaatcaggatatgttctctgcaggaagaaagcaaatgtgctatacttaaaattcagtgtatgacagaaaaacctaaagaagacttatagtagatgaatttacattatctgaaaggtattttatgcaccaagttccaaagttagagaaggcaactaagcaagggactgccacttaagacacaggcattgtctatggagtctgggtgggccaaagaagcaagatttgtgggaatatcatgagagttcctggctctaaaatagttgctctccaatgtccagaaattcctgcctttggaatagtccttggagagacaattttctccaacttagaccccctttcccactaagcatcctcatgagcaggtcaaattcaatgtgaacttttggcagggaatcctttggaggtttatgttttatcttaaaaattggtaggaactttgcatcttttccatcacatattcatgttttatgtaacataaaattatcacccattctgcaaatctttgagtggaaatgaagcttcaggaggatggaccgtatctcttccacagtcctggccactctgcagaatactctctggtcttttcaggaggagggggatcctactttgagaactaaggacttcagtcattgtccaattggtagtctggccattgtcctttgaaaatgtacaaatcctctcttggaacagtaatatgtgagtttatttttacattagaaggaggtactttatcaaaggagttcattttcattttggaaaacaatattctggtcttggaaagattgtaaaccagaaaatctttggtgatgaaaaagggcaagatttgaaagtgtgggatactgtgccggaaaggtaaccttatgtggggatgtggggaatctgggctgaagggggaggatttgggtggggctggaggagaagcagatgcagagaaaaaggaaggaggtgtaagccacaaggtttgcccgaggttttcttaatggctttcaattctcccaaatctatctgcaatctcggttccagtcctccgctctatttccaactgctctgtccaagtggcagcatctccagcttggagaatcaagtcaacatgtctaaaatgccaactcacctgtgagcaactctgcctactccttatcatgcagcattttcacctgctcattcctgtgtggcttcagctctcacactgccaactatctgtctcccttttccagccagaaactgggaagtctttgtcttttccttcttcccaacctcccatgcacatgtttagttgatcatgaaatctagccaggcttaatgtaacctttgaaacattcttttattctctgtagaaattacagttcctgcaggaaactgagcactcaaagggctgaaaggtagggtttaatgaacagttggctttcgaatagggaggagaaaactaagtaacagtggcaaggctggatgcagtggctaacatctgtaatcccagtactttgggaggccaaggcgggtggatcacctgagttcaggagttcgagaccagcctgaccaacatgttgaaaccccatctctactaaaaatacaaaaattagcccgtgtggtggcaggcacctgtaatcccagctactcgtgaggctgaggcaggagaatcacttgaacccaggaggcagaggttgcagtgagctgagatcaagctgctgcactccagcctgggtgacggagtgagactccatctcaaaacaaacaaacaaacaaacaaacaaacaaacagtggcaaaagacccaagggcaagctgcaggatgcctttaccatccttaggaaaataaggtgcaaggggtggcagtggaattcccaaaagtacctgatctctaagcttggagctgtggaagaagggccacctgatgggagctaaagcaggagatgcagccactgccaggactctggaaaggtgtaggggcagtgagggacgaaagccagggagacaatcgccaccatcatttgctgtccctcttctcatcctctgatttcctgccagtgcttccagttggcaaaggccaaccaaaaatcacagggcaaaggagctgtaggccatagataggaggcaggctcctggggtagaaagagtgcagagaggggagcaaaaggaatctggtagggtaagcaacacatggagaatggccagcccagattcagcccctcccttcaacacctgaaaattcggcctgaattcaagaccattatttctttcttgaatgtctggaaaaaacaaacaaataaacaaacttcccagtggtcccagttgacttcagtgtgtgctctaatttcattttataaacaccatttcttagcaatttcaatgctgacagatggagctcatgtgccagctaacaggaaaagagcatcatctatgagcacaattccccacggctggagctccttgcctatgttcccccctcaagagcatacatgaggctgcaaatcaaacagatctcatgtgatgattagggaattatctgtatttcattaagaaaaataacttgtacactcggtttgaaaaaagtattgaaggccgggcgtggtggctcacgcctgtaatcccagcactttgggagcccaaggcgggcggatcacgaggtcaggagttctagaccagcctgaccaacatggtgaaaccccgtctctattaaaaatacaaaaattagccgggcgtggtggtgtgtgcctgtaatcccagctactcaggaggctgaggcaggagaatcatttgaacctggaaggcagatgttgcagtgagccgagattgcaccactgcactccagcctaggtgacagagtgaaactctgtctcaaaaaaaagtattgaaaacatattcttggggcttaatagatattcatagagagtgccgaacagatatttgttaaaggggtgaatgttacttgtgacactcacaattagtggatctttacatgtgaatgtgttgaatacaaccagacccctttaattagacacgctgttctaaaatgaatttctaaggtatgaatctaatctaatcacctcttgacttacacaggctggtagcttcccattgtcaagaagttcttatcatggtggaaaagatctcttcgtcatctcaacctccaagcctcaccctggtctttccaggtctcttctcttacctatcctgacaccatctgtccccatctacgctaagatccttatcagtcctggaagaacacactcaaagccaatgatctttgcgccctctgtatgttctctcaacacttagcattttaatgaacattggcccaaattccagctgccagcacccgacactctgcccaagggcttctctgaccgacacaacccactctgcccatgtgtggggaaggcttcaagtgccaggaagttaatggcccctggaagcatccctgaccagtgacttccaagaatgggtgtataaatacctccactctttcctcccttgggtgagataactctgaggcacgtgtttgacattgcttcatggagttccccagcaggattaagttccagttgccctcagtggtaactcgggcttgattcatcctttatttgcttccttcctttcctgtcttacttcctcacctccctaccagtgttccggtgaatcaccttccaaataaactactcacattggaatccttgcttcagggttggcttttggaggaacctaacgtaaaatatttcagtattctctttcagctttttcttgcctttgcataagacattgtttgtgtctggattcccctttgtttctttttaaacaaacatttaaaatgacacaggaaagcacaggaaaagaaagaataaaatgtttctccttcatcacctattcccctcccttctctctctcatcctggtctactttccttcccagaactaaccactatttggtatacatacctccaaatattttctttatatatacacatttaaaagtatgtagatatacaaatgtaaatacatttaccaatctgtgtatacaatgataagtgaatttgaacacatccttatacacagtccttttcacatgaatgaaatcacattatacatgttgcattgtgacttgtttttttttcaataatacaatacccttagattccataatatagtgtgatatactataattattgaaacatttctcctattgatgaacacttagggtcctgatactttttccactgttataaaaaaatgctgcaatgactatgtgagtgcatatatcttgcacacatgtgctggccatcctgtagatgaatgtgtctgtttgagctttttagttttcagcaatagaaaacccaacctcggccgggcgtggtggttgacgcctgtaattccagcacttttggaggctgaggtgggcagatcacctgaggtcaggagttccagagcagcctggccaacatggtgaaacctcatctctactaaaaatagaaaaattagccaggcctggtggcgggtgcctataatcccagctacttgggaggctagggctggagaatcccttgaacccaggaggaggaggttgcagtgagcgatcctgccacggcactccagcaggggtgacaagaatgaaactctatttcaaaataaagaaaaaaaagaaaaaaaaagaaaacccaacctcaactagcttaagcaaaagcaaatttatgtggtgaaagggtggatctggttttagaatcagttaccaagggctcaagaagtgtcacagggactgatccccccacccccccgtcccccatgtcgtgtcattctccaggtctttccttttcattgccaggagctccaggtttctaccctcagaactccaaggccattggaaaacagagggcagttttcttagttgcccaaggaaatgttcccaaattgtatcaaaagcccacctctaggttaattattgtggctggaggatgtaatccattcataggtcagggctggccaggtgtagtggctcatgcctgtaatcccagcactttgggagactgagatgggtgggtcacttgaggtcagaagttcgagaccagcctggccaacaggatgaaaccccgtctctactaaaaatacaaaaattagccaggcatggtggcgggcgcctgtaatcccagctgctcgggaggctgaggcaggagaatggattgaacccaggaggtggaggttgcagtgagcagagatcacgccactgcactcaagcccaggcaacgaagcgagactccttctcaaaaaaaaaaaaagagagaaacataggctaggactaggcatatgccatgccttgtgacataaactggacatggggaaggggagtgattccccagtgttagttagccttgctcttgtcactagaaggaggaaggaatgctgtgtggcaaggaaaggaattaatgtccacttgagatggatttgagaaggatgtctgcaagcagaaataaagggttaaagggtgcttacattaaaaattttgatagctactgctctcaaaattgtatcgcgatttatattcccagtgccaacagtgtttgaagagtctggctctccagagcctgtagacactggatattgtcagtgttttaaatttcagcagatctgatatctaaaaatggtatctcactgttctaaactgttctagtatggtgttctacgtgaacaccctttcatgtgtttagctggcctttgcatttctttttttttttttttgaactgcctatgcatatcttttggtcaaaattcaattgaattgcccttttttattgttagagctgctacaaacattactgaaaaggcaactcagttgtgtgtgtgtgtatgcacacacatatatatttataatacatatgttacttagggtttgtaccagctctatgagctccttgagggtggcaccttgctgtaatacagcctgacacctaatacgaagtagaaatcagtgattatttatcacgcaaataaagaaacaaataagtgaacgaatgaatgagtcaatagtgttgactgccttgtattgtcctaggcccaagagacagtgaaatatccctgttcttgtatacttttctgtaagtttctggaagtttctctgtaaagcatctcagtaagcttttctataggctgtgagaaacgcatgagtcaggctaataggaggcatataattttgaattgcttttcagaaatggccttcatattcctttacactcactcatcctgttgataagagcagatggcctactgcatgtgactcagactcaaacacacacctccgctcccttgaagtgccagccctggagctttgttgaggctcgcatctgccacgggagtcagctagtacgttgcccagttcaacatccatccaggatttcataggaacttgagaatcattgtttttggcttgaatcctgggtttgaggtttcttcgtgtaggaatctgaaaaaaggatttggaaacgttgttgtctctaatcccaaagtatgtatctgggaggctgccttcgccatcacccacctaataactcaggctcccggggccatttcgctcaagtgcattcattcctttggtagaatcaaaagaaactgatccaggtgacagagtacctgggttctaatcccagttttgatgagcaagttatttaccccttacagccccattttccctattctaaaatgatatggttgcaactgacgatctccaagtctccgtccaactcaacaattcagagtggaattctgaattctgctctgccaccaacagcatgtcctcggagctttgcctattactcatgagaatgtcaacgtctgggtaaatagatattttggggtcagctctaaaaaacccagaagtacgtattgtatgttgattttggcacacggacaagcctgaacagggctgtgtcaagccttttaccatgatagctgccggaagaaaggccaggcgaagcagtctgggtgagctgcttggaatgaagaggaccagcccacatcccatggcacagatgaccttcaggagaagtggaggggagcagctaatgtaaagaaatcattagcatctgtgttggaaatggcttatgacactgtctcaaagccacgttctcagacaacagggaaagctgtaaatagatgcacacagttatccaagcatagcagagtaaaactaaaggaaagccaaattaaacaggctcaaccaaagttttgagtgaaagtgttgaatattgctcatgccttcagaacgggaagctctgtttagaatactcacaatggtgggtcctcttgaggtgactacaggctggtaggtcggttctatcctccccctaggagccatctcagcaaagaagaatcagaggcaaagactctttcaaagcaaggacctcacactgtgaaggactgggagcattgcttgattgctactcaactggcaaaagtttttaaaaagcaagttaggccccaagaccacatgactgagaatcctaacacataactgagaattataataacatgatggattctccttgaaaaatatatttcgtattttggcataatttcaaacttacaggaaagttgcaagaattgtacaaatgatttttgtgtatgcttcatacccacattctgcattttaccaattcttttttcccttcctccctctttatttcatatatatgttatatatatatatatatatatatgtgtgtgtgtgtgtatatagacacacacacatatatgtaacagttcttgggtatgtgtgtgtgtgtatatatatatatatatatatatatatatataatgtatatttcccacagaactgtttggcaataggttgcagacatgatatcttaaacatttcagtgcatattttctaaaaacaaggacagtcttttatataactgtagtaccattaccaaaatcaaaaaattaatattgccataatattattatccagttcatagacttcattcacttccccgactgtccaaaaataaatattttatagcaaaagaaagtcctagactacatgctgcattcagttaacacgtctttagttgttttttcttttattttaatctggaagtttctcagtctttctttgtctttcatgatatttttgatgaatacaggccagatactttgtggaatgtccctcaatttgggtttgtctgatgttgtggaatttccttttagctctataagctgcctcctgaaatacaaatgcctagttaggatgtgactggctgcaggaaacagtctctccagcctagcaggctagagctcatgcaaactcccctttgccccatcttggggatttcctccctatcctcttcaaacatggtttctctctctgcaagagttgtgggaaaatctgatactttgcttgttggaaattagacttatattgtttcccacagacatcgtgttggatgtgacagatgggttgattcttcagttttatcagtgttaaattgtaggagcactaaatatgcgttacaagcagatgggaatagatttatgatgtatagcttagattctatggaaaaataaactttaggctgtaaacaaatctatgtacaaattaacttttgcaacaagatgagctctttgttggcagcttctgtttgtttgaaagttgtgtttgctataatgtggttcaatctttgtctccacttggatgggtttcattatttaggcctccaaatagccttactttaaagtctcccctataggttagtcctatggcatgaaatctggaaataataatgttgcaaaatttcagtaaatctaaatatgatttatcactcatccccacatgtcattgtcaaaccaagaagatgaaataagaggagatagtatggaatgagagaactactcaaggtgttccacctgttttttgatagacaattgaaggttttccttagttttttcctaaggactgagacatttctggacaaacctgccagtcagctgagaaattttcctgagaaccggggatcagactcttagaattgcagtaattgttacaaattgcaatcaaatctgggaactcttaaagatgtcatccctgaaataaacctcagtaaatttatctaggttgaaagggaatctccagctttactcagtaataagaagttgacacatatacatacttgaatgaataacttaattcttaggagacacttaaataagaattatttctgttattgaaacacagttccagttacagggtctttgaaatcatgagagagttgtacagttatatttctgtatagtgtgaagagctatcttattttttgcagattacttactttgttaatatacctccccctcctttaaccaattggtccattattattgtaagcgtattacaaagaatactcttttggaagtcagaagaatgatacctaatctttaatttcttatcaggaactagtttttcattgtatgatggacacgatgtaacccctaaagacagaaaaagaagtgaaaaatagtcctcattctcatggatttatagctgtagtagaagaaaagatagattaaaaagggcataagttcctctaatgtttattgcaatgtgaagctagatagaaaaatagaagaaaacagagagaatcatgatcatggcaataaagagagagtagctaactcagctggaattggcctggagaaaacgatggtgagaactcccggagaacgttagaactgagctgaagcttgcagaatgcataggagtctggcaggcagatgaggcagggaggacattaaaggcaggaggaatagcacatgatagtgggctgcaggctgggctgtagtttgaggggctgtaattcaatacaggcggatgcaggggaaaagcaggcggtgaagtgaaaaattagtaaagggaagatcatgcagaaccttgcagatcatgtaaggagcttggaatgtcatctccatattattcaatcatcagacggacttcaacaaaaaagccacattattgaatggcagaggttggaggggacagagactggaggcaggcacagcagtagggcactgtcataataaaatattgagcagtgataatgactaaccaggggtccccagccttcgggccacagactggtgcaggtccatggcctgttaggaaccgggcaacacagcaggaggtgagcttcgggccagtcagcattaccgcctgaggtctgcttcctgtcagatcagcagcggcattagattctcataggagcacaaaccctactgtgaactgcgcatggaggaatctacgtggcgcgctacttatgagagctactactgcctgatgacctgaggtggaacagtttcatctggaagccttctgcccccaccaaccccagccatggaaaaaaaagtgtctttcacaaaaccagtcccctggtgccaaaaaggctggggactgctggcctaaactgagatgatgggcctgggaatggaggaagtggtatagatgagaagaatgtttcagagatggacgtattaagatttgttgacagatgggatgtgatgtttatgaggaagcatcagctaagaatgactttaagattcagccttgggtggctaggagggtgatgggcatattccttaaaatagggaatctactggtcgggcgcagtggctcacgcctgtaatcccagcactttgggaggccgaggcggccagatcacgaggtcaggagattgagaccatcctggctaacatggtgaaaccctgtctctactaaaaatacaaaaaaaaaaaaaaaaaaattagccgggtgtggtggcaggtgcttgtagtcccagctactcaggaggctgaggcaggagaatggcatgaacctgggaggcagagcttgcagtgagccaagattgtgccactgcactccagcctggatgacagagactctgtctcaaaaaacaaaaaacaaaaaacaaaaaaacgggaatctactgagcacagtggctcatgcctgtaatcccagtgctttggaaggccatggcgggtggatcacaaggtcaggagttcgagaccagcctggccaacatggtgaaaccccatctctactaaaaaatacaaaaattagccaggtgtggtggtgggtgcctgtaatcccagctactcaggaggctgaggcagaagaatcacttgaacccgggaggtcgaggttgcagtgagctgagatcgcaccactgcactccagcctgggggacagagcaagactccatctcaaaaaaaaaaaaaaaaaagttgattggaggataagaaaaatgatatgctcagaattttgtaaatgtggattttgatgtacccagggaacatccaagtgatgatattccataagaagttgaaagttgggttccagattgcagaacaaattaagacatctggggccaggcatggtggttcacacctgtaattccagcactttgggaggccaaggtgggaggatttcttgaagccaggagtttgagaccaacttgggcaacatagtgagaccctgtctcaaaaaaaaaaaaaaagagccaaccatgatggctcatgcctatagtcccagctgctcaggaggctgaggtagaagaattacttgaggctgggagtttgaggcttcagtgagctatgattgtgccactccactccagcctgggtgacagagaccttgtctcaaaaataaaaatgaagataagacatctgggagtcattggtacataggtgataataataaaacaaataggaacagatgaatccaggaaggtctgtagcatgagacaagaaggaaacagagaacaagcattcacaagtgggattaggaggaagattgtgccaggaggaaactggaaagaagcagggagagaggtaggagagtagtcaggagagacggctcacatggaagagagtgaaggagcaagtggtcaaggtctcttgaatacagaggggttcttacaatgagatacaatcaacacactttgagaaataatactttatttagggaaaatatctgcttgctgtatttttctgaagattttgtttacagaagagcaagctctccagcagctatatgttttaggcaatgtggctctcgaatcttcattctgtccaagtacattcacgtgagggtgctgccgtcttttgtaggcctgtcccaaggccggctgcgactttgcattttcgcctggctgtgtctatatcttttaaaagccagcaatttccacaggaaaattctgctgtagaatattgaggagagggcttggtaaaagctggaatgaatggtgtgtgtgtgaatggtattccccagcatgcatggacctggctggggatgggggatcttccatttgcggcagggaggaggcaagaataaacatgagatttattccatatcattacctttcctccttgactctatttcaggctgcatggaataatgtctataatcaatttcaaagcctctcaggagtgatgagtaagtaccggctatacttagggcatatcatctaatatctctcctgaagtgactagcaatgttactattttctcatgattccttcaagtatattatatttccatcatatacatgtacagtaaaacttttctttttttctacctacatacataatatactataatattcccccccccttttttaatagtacatcctgatggtttgttccattccagtacaggtagattgcttcattcttcttaatgattgcatgtgatcctattatatagatgaccataattatttagccagttttttattcatagatcacatggattagattgcttccagtattatgatattacaggtaatgctatagtgtcttattttacacaggtgcaggtatatctgtagaataaatatctagaaatgttattgttgggccaaagggtacataaaattttaatgcagagatatctgaacaggtttgaaaatggtcagaatgaaaggcgattggttgggacctaatgcctcacttattactcactagagattgtaggatgtcatcactgtaagcagatgtgtggccacagttttgtgtactcaagttcagtaaaatcaaggcataaggcaggaccgaagtagaatagaacaaaactcttctgaacatggtgaccccaagacaattggccattgtgtggcagtgttcctgaagatctatgcctagccaatgatatggtccatgaggttgcatgtgaactttgtatgtcagatgcctgactcctgatatatgctcagccctcttcttgtttagataggaggctccatcaactcctaccctagtaatgtgtagtcccaggcctgggagccaggtcatggattaaattattaagttgaaactgtcagagtgaaggagcaagttatgagattagttaagtagcatatcaaagccagagtggtaacaatgaaagtaatcctccattcatataagagcccaatgtctctgtagcttcattttcctacctcttgccttcttcccaccaacaaagagttgagatagaaaatgtaagaattggatgtcataaaatcaagaaggttttctgttcaagatgttccattccttgcaattaactcccattggagcccaataccataataacgtttcctgtgccagagtccccaaaaagtaggtgatgttcccatggaagattagttgtttgtttcaacagggaaagagaagtaaatctaaggcaccacctctggcagcaggacacccccttctcctgcctcttgcattttaacacataaagcagataaggtggaggagagaatggggctggaggagaatgttcgagttacccagagaagacatgagcaagtagagcaaagaaagaactgtgacctcccagtcacccatatttattcctttatcaaagaacgcaggagttagacttctcttttcctgatctattgtttctggagctcaggaagtacaatgcaccatggcaagtcagagtcatgagtttcaattccaccttccccattatctggctaagcaatggtggacttaatccaacgaggttcagagtctacatttataaaacaggggttatatcagtacttatgcctcaaagataacataggtagagatttggcatactgcttggcacatactaaccagtcaatgactgttagatattatcattaatactaatcccacagagtcagttgggttgcaaactgttttgcaccaaagtcaacattatagcacccactgtcacaatcctttgggcagcatcatctctttgcatcatccttgttggatcatgtgtggttcccatatgtgcaaacacagtccaggtaattgcattacatggcagagagactcaatgcattgcacacagctggaagctaggctactcatttttaaagtgagctccttggctagcagcattaacatcacccagttacttgttagcaaattctcaaaacctgccccacacctcctcaataaaaaatctctgggcgtggggcccagcaacttgtgtcttagcatcccttacccttgccagaccccaggtgatactgatgcatgcgaaagtgtgaagaccactgatctagactgtgggatgccattgaacctctctacttcaccaaggaagagctagaggggaagcagaaattcaaaatggctggtagctcagggacaaatttgggtgaatggcttaacagtcttgcctattcttgaatgttctcctctttggctgggaacggcctgtcaggctgcagatatttcctttcctctttctctcactgcttatctcccacaagacacaagatagttcctgcccaggcatctcagattaccattccttcctgaaagccaattaaaggtctctaatccctcctgtgtttacctaaaggatgaatttgatcggaaaggatgaatggaaagggcaaaatcctagaagggctgggaaagaaagtttctgctccagtggtgggaacacaccctttctcactaagcttattatgtactggtgcattttttgaattacaattctccatcagcctgccccttttatttgaagccctcagttgtgatttccaatgcagcttctgactttgcccttggtattcatacttttgagagtctgttcccttcattaacatctcagggacccccaaagtaatactttgaaccacgtgacatatccgttttgtgagttgaaagcagttggatattaacaatttcttataattcaacttcatgtacccactcgaggtctcttatttgggacacatcattctgccttagtccgaattgaaggcagctgagtacttctgggaacggcagatcatcttctttcaagactacctagagtttgccactttttggctgggatccttgtataagtaagtaaatctcccaagcctcacttttatcatctgtgaagtggggatgctattatcttctttataggttgatgtatgagtaaatgagaaatcaggcatagagtgtctgatatggtgtctgaattgtagttttttttttacaacctttagtatccttctttagcgaggctggaggtaacactatcgtgctaaaacttgatccatacctttcctgctaactcttagcctcgtcctacatatctattggtggtgagcctccaagttactaccattactcacctgaaaatgggtaggcctgggcttttttaaaaggcccttaattagtacctttttttatgagatggtaagacaaacgttttccctgccttaagtaaccattattattctcatttcaaaggtgtgtcagatttatttatttacgtgttttggaatcttagtaggagaagagaaggcagcccagtaaatggatgcagattgttctggcctcatcgtcaactgcattgtgcaatcttagagaaatgacttacctaactctgatgtctccattttcctattctgtatgtgaggattatgtatatgccttgctgaggatggaagtgctagacagagctagtgtttcataaaaatgttttgagcttttggaatgcagaggtgttatatatatacaaggtattactggattgagtaaggattatcattattctttggcaatagccatgacatcaggaaaacatatcttctatcatagttcaaaggcagaatgagaaaagaaaacatttttttttttttcagtagaaaagtcatcagaaagatgttttggagggtgtaataggaatattctcaatggcatttaagagcaaggtttagagctatctgtacttgtcgcttcctccagtacacagtggtatagcagtcctgatggattgtctttctggctaattgttagatgttaaaaaaggtaagcggaacctgataccttgtaagttggactgttgacaagagaccctgtgacttttcaaagatgagtgttgattggaaatttgcatgtgttcccagacattcttgtttatggaattaccctattcttggaagtaaaaaaggagaaacaattcaatgttcccattgacaaaatggattgctctatgcttgtaaactgtgctgtagcttattcatatactgagagttgaataatgacaggggtatgatgtcatgcatgagcagtgaattggggaggctcactttccttagtgtgaagttgtttgtatttgcagagagatggggaaagtgatgtttgaatgggagaactggaatctggggtcttgatttttttttcttgctaagttaaagtgcttgtagctttttctttatatcaaactatacagatgaaacccacacatataaagaaaatcatatggaactggcaaacaaaagatattcagtgactcaggtttctttgtcaacttttgccacccaccatgacaagatcaacaggctttgctgtgtatagacgtgtattctgaattccttcctcccttaaaaacattccattgccactgatatctccactcatggggcagatatccagtaatcccatggatattcttgattcttccttaataagtaaaactgtaagtatggcctagtctttctccactttctgctttcttgttcattactgtaattgcatgtttacatctggagccctgggtttttgtgtttacgtagttatgcacaagcctgagcagatctgcaaaacaaaacaaaaaacaaaaacaaaaaacaacaacaacagagccctcaaccaattatatgctagttcttgtcccattcttttttctcttatggggaaggcaggtaatcaggattactagtggctgccttggaagtgatacgttaagcaaatgaaaagtcaattaatacctttactgtctaaccctaaggcaagtcatgattgaagaatttcatagttacgtatttgacaccagcacaatagtaattaaagatattttcttgcatttttaatttgataaatgccagttttctggtgtgagtctaactagattgtggcttccctagaggtgatttgatatgaaataatttttttgacattttgccttgattagagatataggaactaaattgcgaagtatgatcaggtggattctgccctagaactgcctttttctttgcaattctccaaaatacctcacagctgaagtagccatgtggccaggacagaaagcttgagttagcacaattatttcagttgtcattggagcagtttgagttgagaggtttttttattgttaataatatctgtctgaagacatcagtgtaacccaggatggcgtgccattgcacatatttaccaggttttctaaatgcaccttagtcagaagaagttgttgctcagtcttgggaatcgtggtaatttatgggtggcagctcagtccaaaccagcttttcgcctctctatgctggtttgagctcttttgtgtcaatgtagccttcctttccttttatcttctgaggtataattcaaggtttgtggttttctgttgtgttttgcgttagttttgtaataaacatcacttcagagaaggctgattaacatgggaactaaatgtccattttcagctagactgccttaatttaaatcccagttttaacacttgggagttgactgtctgatatggttcaggtatttgtctcctctaaatctcatgttgacgtgtgatctccaatgttggaggtgggacctattgggaggtatttgggtcttaatgatagatccttcatgaataacttggtgctctctttaaagtaatgagtcagttcttgctctgttagttcctatgagatctgattgttaaaaagagtctggaaccttcctcctccctctttcctcatcttttgcatgtgatgcctactcttcttccccttatgccacgagtggaagcttcttgatgccctcatcagaagcagatgctggcaccatacttcttgtacagcctgcagaactgtgagccaaatacacttctttcctttataaattagccagcctcaggtattcctttatagcaacacaaatgaactaagacagtgtccttgggcaagctacttcagtttcctcatctgttgatggggatgatggaaagagtgacatcagcaagatggcagaataggagtttccagtgcttgtccccatattgaaatatcaatttgaagaattattcatatgcaaagataacttcacaaaagctgaggaatctaagtgagagattacagcacagcacgtgggtggagcacaggaataagaaaagctgcactgaggagaacaggaaggacagtttcacattacctgcatcactcctactcctttgcatgggggttggagagtgaggcaagcacctgacttctctaactccagcacagggcctatctcagtaaaacctagctggccttcttagatccaggctccaggcccaccccagtcttcaggctggccctgcagatccaggatccagacctgtcccaagaccaggctcccatggccccaggttcctgtgggcctcaacaaaatactagcaaattgaattcaacagcacaataaaaagataatcaagtggaatttgtccctgggatgcaaggatggctctacatatgtaagtcaataaatgtgatacaccacattaacgggatgaagaataaaaattatatgatcattttgacagatgcagaaaatgcatttgacaaaatacaacatcctattataataaaaactctcaatatattagggatagaaggaatgcacctaaacctaataaaagccatatatggccaggcacaggagctcatgcctgtaatctcagaactttgagagactgaggcaggagaattgcttaaagccaggagtttgagaccagcctgggcaacagagcaagactctgccatctctacaaaaaaataaaaataaaaataaaagtaaaaataaaaataaaaaggctatgcaagaccagcccacagctaacatcatattccatggtgaaaagctagaagcttttactctaatatcagaaaccagacaaagatgctcactcttgctgcttctattcaatatagaactggaagttctaaccagagtgatttaatcaagaaaaagaaataaaagacatccaaattggaaaggaagaagaaaaattatctctgtttgcagatgacataatctttttttttctttttttgtttttacagaacaggatctcccaagctggattgcagtggtgcaatcatggctcactgcaacttcaacctactggcctagaacgattctctcatttgagtttcccaagtagttggattacaggcatacaccacaatgcctacctaattttaaaatcttttttagagacagggtctccttttgttgctcagggtggtcttaaactcttgggcttaagtgattcttctgcctcagcctcccaaagtgctatggttacaggtgcgagccactatgcccagccgacataaccttatgaatagaaaattctaaagattccaccaaaatactgttagaactaataaattcagtaaagttgcaggatacaaaatcaatatataaaaatcaattgtgtttgcatacactaacaaaatagcatctgaaaaaaattaagacaacaatcacatttacagtagtataaaaaacgggcatacatttaaccaagaaggtgaaggatctatacactgaaaactgtaaaacactgatgaaacaaactgaagaagtcacaagtaaatggaaaggtagctcatgctcatgaatgggaagaagtaacactgttaaaatcttcatacccccaaagtaatctacagattcaaagaaatccctaccaaaattccaatggcattttttacagaaatagaaaatacaatcttaaaattcatatagaaccaaaaaagatcccaaatagccaaagcagttttgaacaagaacaaagctaaatcacaatacctgatttaaaaatatactacaaagctatagcaattagaacagcatcgtactgacatataaatgggcatattgaccaatggaacagaaaagagatcaaggaaatacattgatttacattcaattgatctttgagaaaggtgccaagaaaggacagtctctttaataaatggtgttgagaaaactggatatctacatgtagaagactgaaattggaccggatcttacacaatatacaaaaatcaattcaaactgaattaaatacaaatttatgacattaaactctaaaactactaaaagaaaacatagggaaacagctcctgacattggtcagggcaagaattttttttgggatatgatctcaaagacaccaggaacaaattcataataaacaaatgggattgcatcaaactaacgagcttctgcaaagcaaaggaaacaataaacagtgaaaggaccatctgaagaatgggagacaatatctgcaaaccatatatctgataagaggttaatatccaaaatatataaggaactcacagcacttaatagcaaaagccaaaataacccaaataaaaagtgggcaaagacctgaatagacattgatccaaagaagacatacaaatggccaacaggtatatgaaaaagtgtttaacatcaccaattattggagaaatacaagtcaaaaaccacaataaaatattacctctcacctgttaagatggctattatctaaaagaagaaagacagcaagtgttggcaaggatgtggagaaaagaaaacccttgtacactgttagtaggaatgtaaattaatatagccattatggaaaccactatgaagcttcttcaaaaaaatcaacaataaaagtaccatagaattcaggatcccacttcttgatgtttgtccaataaattgaaaacaagattgtgaagagatgtttgcattcccatgttcattacagcactattcagaatagccaagctacagagtcaacctaagtgtccatcaacagataaatggacaaagaaaatgtgatacacagagacaatgaaataatactcagcctttaaaaagaagggaattttgtcatctgcaacaacataagattaaacctagaggaaaatggaaggtcatgcacaaaacgatatactgcatgatctcactatgtgtggaatctaaaaaaagttgaactcatagaagcagaagtagaatggttgccagaggttaggggatggaagaaatgaggagatgttggtcaaagtggacaaaatttcagttatgcaaaatgaatgggttctggagacctaaggtacaacatggtaactatagttaatattactttattgtatacttgaaatttgctaagacagtagatcttaaaagctcttcacacacacacacacacacacacacacacacacaaaggtaattatgtgaggtgatgaatatgttaattagcttgatcatggtgatcatttcacaatgtataatatatcaaaacatcacattgtatactgtaaatatatataatttttatttatcagttatgcctcaataaggctgaaaaaaagggatgataaaaatgaggctgtcatgaaagttgttagttaattgacataaaatactcttaagctttcaataaaccttagccaatgttattatcaatttttctgaaaagctgaactgaaggaaggtatttgtgtcagccttttaaatatcaaaacaggagaaagagcctgggaagatcagttgggaaggcaaagtggccaatatgaggagaaaccatgatgttgctttctgttgtttttactacttggtatcattagaaattacatcaattttgggaaaaaattttcagcatgaaccatttcaaatttctccattttctatgtaacagtcataatttcactttatgttaaaatacaaagatttactgggaggagggacgcttggagaggagaataagagagatggttgaaggcagggaaagagggctggtaaggaaagttacagacattccattgactttctctgtagggaatgctgagtttgggttaaggttatattgccaaggacttactaagggagaacatgacttttataggaggagacattagggttagttgaattgaaaactttctaaaaatgactgctgttaaattatcatttcctttggtcttggtttcgtttccccccaaagcaggccctgaggcaggtactttgtttggaaggtgaccccagaaagccaggtgagggggtggtgaagggtgagacagagagggaaggaagccaattccggctaccgctgtgggtggtggggctcactgttgctgggggcctctgggaaaccatgtggaacacacctcacacatgtcagggaaccctgcatatttatcaacttctgtttctcattggttaagaattgccgtggaggtgttaaacccctagtgcttctgagctgtcctgggctgtcctgtgctggactgagcaaacacgtacggcgctagaaaaagccatcaggctgagaagcagagggaggtgtcagtgcatgagggggaagctgccagcctgcatgaaaactggctgctgcacatggagatgaactcaggtgggcagagggtactgtgtctactatatccagtgacttaaaagagctaattttcacacaaggggtaaataaatggcagagattaaagttaacaaactgcttgtttcctcagtgtgagagaatggtctccctacacaccttttcttcctttcctttttcttcccttccttcttccttttataacattatcttgcattcttttattacctttcatatatcaccttatatttttagaattctatatcaggctattaaaggcagagtcttatatatctacgtaattagctagccatatctaaagctagctaataatagataactaataattatgtcaaattacagattttatgccaagacagaatgtttagaagttatcctgtctaacatgcttattttacctctctgtttgccttcccaaaatggccccatatatctgcattatctttttaatttttgtattggtagacctcttgaaatatgaagaaattaaggttgcttctatccaggagagaaaaaacagtacagacagagtgcttcaataggccaagaactgggcttaaaattcaagaacagcaaattctgagcttggctgtcaggtttaataacttctgctcctgacacacataattttgcctcatgtctgacagctcacctcaaaacactgattctgaaactctaataaaagcaattttaactttaacttttggaatagatcatttaaaccaccagagaaaaattatcaaaacctcattcacatggacaatttttctcactatgtttgagaaaattgacttccttcaattctcaattcatgtgattttctcaggaatagagttcagcctagatcaaatgagattgccattaaagcattttattcaatattaagcctttgtattataaaggtgtgataaaaatggatcaaaaactctgtttctaaaaatttttcagacttaccttgactgtaacaataggcaccaggaacattgtctttgttccctaatgtaatttagcacttagaattgttcttggcacttaatagatgctcaggaaatgattcttgactaaacaattaaataatgaatggctttttagtggctctcagagaatgtggttcagatagctatcaaggtctatgttcaaattatcatcttacagaaccacaggtatttgtctaagacgtgaaagatattaattctagccccttctatcatgatgtatatatgtcattcctgtgccccaccctgccacacatacatgctattaaatatgcttagaccatctgggcatacgtcaatcatttggaacgtacccctgccacctgggtaaggtggagctatctggagttctccaggcctgcatactgatatgtcaacattgcggatatctaacaaatgtttattaaacgattatgtaaatgataaaagtttcaattgttatttccagagctcaaaacgagttaaaagctttatatgacatgactcataggagatacaaagactgcacgaaccatcgttagcaaaggtcttgctctggcaaaatatctgcgcctatattacatttaatccagaggcttttaaaagatttagatctttattgcttttttatgttcttaataggatcaaaaataattttagaacatactttgagttgcctataaatactttccagttcatattaacacaatactttttcttctagatattttacttatagacatcatttcattaattttctaaggattctggcctgtttattttggggatgataatttccacagtcaactattttctggtgagcctttggatcatcagttgtttagcttaatagagagttaacccatatttaattcaccttactaattttaaaagaattagaatacaatagagtttattaaacttttcaaatcctattgaacttcaattgctctttctgattggcccaaacagactccagggctgtgtcatgccttgggtcattgttaatgcaataatcatgattgcattgcagaagtgtgtctgtgtcagctcataacataccatacacaccgatttccacttgttgaatatccagcatgcccagtctttggttctaatcagaagaactatttcctattcatatctaattgtcttaattgccactgcttcctattatgccacatagtagataagaaacacatcagttaaaaatggtcaacctcactgcataatacctagattacaggcattttatcacagagctcatataagggaggggaatttatttgctagatttttttgtgttataaatccaaagacatttcagggaatgcaggcctaatactaacagcatgagttgtggggctgcttgtgtctgtttaccacacaactattgtcttactaatgtcaacttttaggcaaggaatgtgctttatttgacttacagttggcaaaaaggtgattgttccagatatgaacccagtggatacttctctttctagccttgacctattgaagaaggaagctacttttttcagtgagttacttcaaaaccagcagttgcattttaatagatcatccacattttggcagctgaagaattcagatgtttctgtgactacagaacatctaatgtcaactctgtagttgatagattaatcatgggctggtctcttggttttagtaaaaagaatcagatttcctttctgaaaaaaatgttttagtttatgtcctttcttctttttattttttttttcttttctctaatcagcagatcaaaactttgggcccttcttaaccctaattcaaacatcacttcagaagttaacacatttgagctccaaaagcaatgcttttaacttctgtcccatggtcaataaggggctaaatcgatctataaacagtgtcagatggtgtctcacacatggcacttaagaaaccttattcctgatagagccttgacctcgggggcccccctgatcaggaggtctcagtaacactgaacagggaagcatcaaaggaagggcttgtgcggtcccacgagcctgactgcagcttggactccacggtgaggtgcgacggccgggagagggtgttgaagacagggcaggcatggtactgacatgactgctgaatatttccagttgtgtttgttgcatgactgaggttggaaggtttcaggctcatttttttcccctagtagttccgtttctcatccttcttgcttttcagtttatctagaagttttgcattgggaactgatggagttcaaggatatctttcaaggaagccaaaacaaagcaagctcagaactgaggaggctcaacatagtttttttggggagcagcaagattgtcatttgttgaacagagtagcattttgatcagtaaaaatcctgcagaatctatggcagatgctgttggtttcctggaggtcccttgcaggcagctcccctgaacgctgagagcttctgtgatctctaggatgtggctgggctgctcgtggggcatgttaggaaacccagaagctgaggccccaggatggttgtcagtgaatgaataccagcttcttgccctccagtgtagaattctgaggtgcgttccctgcggcctctcaggggctccccagtggggttgtgcccacagcttcccacagcaactgactcatgaacacactttgtattggctctctttcccttctctgtctcactcctctagtctcccacttctgcttcctgaggtacttctcaaataaactacctgtacccacatccttttcttagcagctgcttttggggaaacccaaagacagaatcagataaaagtacagtttttgcatccaaaagaatttgagacctcttgaaagttctatttttccaccaagttgataccactgtaccttggtttggattccccgatgcaaatcctgagataatgattttggtacaaatagtgtatttgggaggagattccagggggagcaggaaagtgagatagggaagggaaggaagaaagaaagtggatgttatcaagccaatcacgagtgcgggtagctacagcccagtcctgctgaggcactctggaactccgtagaacatgcctcagaactgtcctgtcccagaagtgaagaagttaagatgttgatcaccaactcctcattcatcattgatcaagggtttctctaggagtactaactttcctgtgcttctgagatgccctgcactcagactgatcatgtactgtggcctgaaaagaagtccttaggaagagagtctcatgtttgcagtaagcagcctttgagaatagagataaatgctgagggaatttgggaaggacactaaaaccccttttacacactcagagatgctaaaagccaacaaatgcatctctgaaataaaatgcaaaggaatcactcattctctcattcaacaaatctttataaagcccttcctgtgtatttggataaatgtggagaagatggactatctgttgccttgcaggtactccaacacttttgttccataaggagttccgtgccatccagcacagaggggaacttttcatcctgatgtggcctccctaagcctggtttcttgaatgcatgggttgttatgcagagcgttggactgagaattaggagacttgtgttctggttcttgttctgcccttgaagagccaaattaccttggaggagtcatcttgctttccaggaccttgatttgttcctgtgcttaatgacggagctggcataggatgccttcagaccttcctgccctgaaatatgtggctgcaggtccacttgcagaagtggctgtggtcccagggctatttgtgctgtgtaggtcaatagctgtgagcagcttctggtctggaggcatttcaggtcaagggatatctgagctggcagaaaagttagagatggaaattaactcttgtaatgaatagcagtgaagctcaggagatgacatgacttgtacaagctcactcagctaagagggggcagaattggagccagaaccttttttcctattattcgattgatgggtctttctttctgcctctctctctctctctttctttctttttctttttcttccccccacttttattttttcctcagacatgatctggctctgtctcccaggctggagtgcagttgcttgatcttggatcactgaaacctctgctgcccaggatcaagcaatcctcccacctcagcctcctgagtagctgggactacaggcacacaccaccatgcctggctgattttttgtattttttttgtagagtctggttttgccatgttgcccaagcttctccagaactcgtaaactcaagcgatccacctgcctctgcctcccaaagtgctgggagtgctgggattacaggcatgaggcaccgtgccaggaaaatggatctttctattagtttacagactgcactttttgtagcaagctattaaacagcactgtttctgagacaaacagtagacaaatggctaaagaaatccccttgatccaagcactgtgatcatgaaattggaagatattcatgtttaagggctcaaaccaaatatcagaggctccacctccttagaaacactctcctgctgatttgttctatgtgctgtccaatagaaggccagtcccatccacagggattgttatcaagtggaaaaggtggaccaaacacctgataaaaaaaaatccagctcatgtacacctcaccatgaagccttggatctgcagatattgatgcagggcttagccggggaatgttcttggctttgctcaggaaagaattcaagggtgagtgggtgatgttatacagcaacttttgctgaaacagcaatgtacagcagcagaggcactgctccttgtggagcaggtataccccataggcagtctgcccagagtagcagctcagaggcagtgctgttactctgggcatatttatactcacttttaattatatgcaaattaaggggcagattattctgaggtttctaggaaaagggtggtaacttcccagttgtcagagcctcctcatggaaaaaggcagtaatttcctgctgttgccatggcaatagtaaactgacatgggacactggtgggtatgtcttatggaaagctgcttttgccttttgttttagctagtcttcaatttggtccagtgtccaagccctgccgctggagtcaagtcccacctcctacctcaatatcacctgcattatttagctttggttaatgtgtatacaagatggcagtttgataacaggtctgagcaaagaaagggaagagaattacaaagagaggtggaagaatccagcctttttagaatggaaagtaatttagatgcaaatttagaagatgacgggaagagaagtgaagatgactcagcactcctgcttcctgtgtccacacaaatgggtgtcttgtttttattcagcaaaagaccagccaggtgataacacctttggcattacaccgggttgagttcaggttgctgatcacagagtgaatgacattaatagacatgatataagctgctgcctattttccagcctgatcgtcacgtgctgtatcatgttccatcttagcaaaattttaagtgttagaagaacagcacaagtccactcttgactcttgtgtggacctacgtcaccaacttcatttcagagctggtctgaaatgcagtctcagtcctgaccccagacctactacactggtagtagtaattgaaaagcaactgtgtttttaacaagatcttcaagtgatttgtatagatattaaaattttggaagcactgttgctgctcataacaagtggataattccttgagtgaaaccactgaaaaatattatcagacaaaaatgaagtactcaaggagaccttgcaaacaagtggaaaaactagatgcgattcaaataatcgatacaatggtgtaatgcttagttgttgtgagctaatatttaaacaacgttaaatcaaacacatagctcttaaaaaacacctgcttcaatttttttcaagtgtgaatgtatgggaggatgttatttatatttataccttgtttcattccacaaaggataaagacatgttgttatcagacataacagtaattacagagaaaaacaccactgttaaagggctgttgtgattccccgcagtgtctttagactgtacactaagtagaagctttcagaatcatcaaattccttttctgtctctgaacccacagaggtaattgtctgtcttagttctgaaatatcaccagcctttgttaatagactctgagatatttgtaatggatgaaggttaaagtttgctttttctgcttttttgtttatttcattttttttgagacagagtctcactccatcactcaggctggagtgcagtggtgcagtcatgctcactgtaaccccagactcctgggttcaagtgattctcctgcctcagcctcccaagtgtctaggattacaggcaaggaccatcagggctggctaatttatttttattttgtagagacagtcttgctatgttgcccaagctggtcttgaactcctggcctcaagtgatccttccacctttgtctcccaaagtgctcgaattatacctgtgagctcctgtgctcagactttttctcttttaaaaagaccattgaaggaatcatttacaaaataaatcttgactaataaattgtgtggagagagctggctaaatgtctaaagagaacaaattttgaaaagcaatttcaaagacttgagaagcgtccttttaatagcagagtttaacagatcaattacaaatcattctttatatttattaaaccctcactacttgttatgtagcaatagcttactgatacagagaaggagtcactaattggggagatgctgatgcctggttgcaacacagaactgccacgtgctagaagacagcaagtacagggttctattcagaccacttgcttctcatgctctaggaatgagcgtgtgtaggacaggaaagactctttcagagactgtagagcaagaatgggcaaggaaaaatccatggctgaaatgagtaaagccatctcttctcccatctcattttcaagagcttcttgtgaccctaaggctggtgtcctaacattacagaacctcctgcccagctgtcataaacttctaaacatgagtgtggatgaaaatattgacagacctcatggtgggggttgggtggggtgatgaaatttcactttccctgaggcatgccagaagggtgaaataaataatggattaacctaaattactctgatgagaaagcttgggtttggttttgtacctccctcttccattctaggtggttctactataaatacctttatttttgtttcctttagggtagtgtttccaaagaatgaaatgtgtatccctgatgttacacaaaaagagtttcatctatttaacattttgtttaataggttaattaattaggtactttttaacattaatgtctatttatgacaagggtcactggttttcaatttagggcagagttttaacatttctctttaacgatatttaaatcaaagtgaactgatttaaaaattgcatgaaatattgaaacaagcattgatattagtaataaggatgataaaagaatattcagttatttagttgaaataaaacaaatttgcagcacaaatttgaattaatgagaacatatttctgtgccttattcctagtagtctaaggcctttttattcaaggacattcagcttcactggatgttatttagttgttcacatgtccctgtgaggtcaagataagacagatagccgttatctactgttagctgtcacatggagaagaaacagactttcaaggtacaagaattgaagcatgtgtaggaagcagagaggtgtctcatcattgcttcaatctttcactgtcacactctccatcataaggtcagctgttgaagtttgtaggtgtcatgatacaggtacagcctgaagagtatttgggttgtttgtttcaatagctaaaattccaccattattgagtcttgagaacccatcttgaaaatgtcagtattatgggcagaaaaacctttgcaataagtcatttgtgaccacgagatctggaagagaacaagccttcctagaattatgtgcagatggtggccgaaggaggaggaaggggttcaggtatggggagagaaaagcagcaatataccaatgggggaaggtattggctgaagtaaagtttagattttagtgctctttttttatgagctgtgtccactcatggccagggtgccacatggggaattaaaacagaggccacctgccttatgtgtcttctaggcaaccagatttggtccccattttgctagctttatcttccttccaggccaactctgggttaggttttaagtggcaatcttagatctgaaggtctgtgccctggaatgtgaataaatgaatgaaagaacaaacaaagtcggtgcaatcgacaccacatttgtctgataggaccctatttgttcttacattcatagcggctaacactgtgcttaacacatggtaaatactaagtatttgaatgaatgaaggtaagaaacccacctattcataaaaacagggcaagaatgactgtatctgaaaactacaaggtcgagcttctcttttgttaactaattcattcattcaataaagaatgaaagaactttgtgaaccaacaccatgctgagaattggcccttgagataaaatctgagttaaaatcatcacttactctatggggggttgttgagaaagggcatgagtttagccataaggccatacacacatacacaaaaattttgtgtattgttttgcaaagacttgggtaggggtagtttgggtaccggtacttgagccctggaagacggagtaacggagcagagaagagtgagacagggatagagagaaagccagtaaaaaggtacactattgagtttgttacaattacacggaactagggatcagttctctaggggatcctttgagtaaccatgtggaatgcttttcaggagtataccctaaaaaactccccaaaggagtaaggtatttctccatctactcccatcacccaacgctgaagattgttcctgagggatttaatgttccctctccccatctggtggctgcccctgtgtgtgggctggtgagaagtgtgtggtatgtgctgaagagaggaagtcctcagcaatcatgacccaccccagctgctgctgaagctggtggctaaggagatgtagcaaaaggaactcatagcctcaactagagttttcttaggggaatttgccagagattatttataaaatacctgacatacaaaataaaagcaataggcagttttcgaagcagatttcaaaaaaaattcttcacctaagcaaaaatatggaatccattgaaatatttaatggaaggtaaaactttagacaacattagggtctgttggctatgactgggagacactaaataattgtaactgacaacagagtaaagataggacacatctgtgtcttggaaaagcccaggattatgtgtgtgtgtgtgtgtgtgtgtgtgtgtgtgtgtgtgtgtgtggtggtgggggtaggagtgtctttctgattacacctgccaccagtgtctggttagggaacaagaacagcagatgtttcttagaagacgaatgagtatgggtctaataaatatcactgcttgaataataatctattaaaatagttactatattagtcaggcatattagttatttcttgctgtgtaacaaagaactccaaaacttagtgacataaaacaaccacttattatttttcataaatctatggattggctggctcggaagttctgctgatctggtctgagtttggttgattcagcttggcttgatttattaacttctggtctgcttggacaattcgctcttctccatgttgtttctcaaccttcagcagactagtctggcttcttcgcgtggtggagtctgagatctcaaagagtaagcaaaagcctgcaaggtctcttgaggcctaggcttggaactggctctgtcacttctgctacatttcatgtgccagttcaagacacatggccaaacctaggtccaaggaatggaaaataaacaccaccacttgatggaagaaactgctaaatcacattgtatggaagagaaataattggaggaaattttgcaatcaatttacaacagagtagcctgattgctctaataaacaaatctcaaatcttaggattaaacatcataatgtttatttcttgttcacagtccaatcttgtatcacagtccaatagaggtgggcaggggagtgagagagattgctccacacagccattcaggtaccaagtttccttctgtctagttgctgtgttatccaaagccatagagcctttgattgggtcctgcgtttccatccactagatgagagaagagagcaaatatgtagaagaaatatctgtccttaattgcctcaacctggaggtgtcatacatatcacttctgcccctttccagggctagaacttggtcacatgattgaatagaactgcaagggaagctgggaaatgtggtccagctgttaggagaaagaggaaaatggcttattgagcacctagctagactctgctgcagtcacaggctctgtgactgaggaactcattcccaaagaaagtgcactgggacacatttcaaaagttgatgcatgatagtatggggcagacaaaggttaaaaagacaaggtcatgattaagtaggggagaaacacacagatacctatgtaaatacctagggtatgagcaagaatctggggaaagacttggagttaggaggaggtgggtgcttggcaggcggtgagactttaataggcagaggtagaagtgaagggcaaagggaaactttgggccacacggggaaactagatttgtttgcttgtttaacactgtggcctccagtgggacctaaagtcgatgccttaatgtaggacggctatgttagtgctgatcagaataatgtaccccttagggctacattaaaaaactatgctcagtgcctcatttgcaccttcaaaatatgcacatacatgtgtgggccagaaaaggctgcgctcaggacatgcattcttatgtgaaccgtaggtaattgcacaagcaaacaggaagttgcgtaggtatgcaggcagctgcctgttgagaggtgcgtgtgggcatgggcaggcgtgggccttgtctgtttgagtacaattttaaaggcttctcctgatggaagggagggcaagcaagcctctgggcacctgcttccctaactgctgctgtcgtttgtccttctcaaggtttcctttctgggcagggccatgtcagggagtatttgtggctgtaagaaaaaggtgccgtttcaaggtctttgctaactgccgagctggtgaataaacgttttgaaattctctttgctgagaattccatctcctggttctcttcctgattctatggcccagtttccccagtttattccctgtcttcttcttctgtttgttcctcagatgttttcccgtgaacctgtccctaatcactttctgaccttctgaaccagagctatccaacagaactatctgcaaaggtacctgcactgttccttgttgtagccactagccacatatagtcattgagcacttgacatggggcttatgggcctgagaaactgacttttaaattttatttaagttaaatataaatagacacatgtggctagtggcttctctattggacagcatagctctagaacagtctttatgggtaataatttctcccttacagtctgccccattattcccagtctgtatctccttaccctacctgctctcctgaaccatgtttacaaatactccaatttgattattctgtggtccccttaatgcaatgtggctaaggttgaactctttgtctctacccacaaaactcatttcttcttgaccttcctcctgtcactttatccttggtcctcccttattagggaacagttctgatcagaccatgttactcatatatattatcatcaagataggtccaggttttgtggatctgagtcaatttgggatctctacttaaaaaaaaaattacagagtacaaatgcaaaattagatttagagccttggagcatcctcggcaagtgaagatgtctgtgaagcttaagctttatttgctttactgcaaattggcctcagtttatcattggaatattctacagtttctgggtttgaatctcagtctgaccacttccttgttccacaacctgggcacagtacttaaccacactgagatcgaattggctattggggataatgataatacctattagactaagttgttgcaaaattaaataagatatatgtatacaaagtctagtacatcttggagccattccatgaaataatgttattcccttgttctcactgcatagaaaatagtaacagcaataacaatgaaaataataacactagataattgtcttagtccatttggctgttataacaaaatcatagacttagtggcttataaacgatggagacttatttctcacagttccggaggctgggaagtctaagaccaagacaccagcagtttcagtgtctgatgagggcccacttcctcgtaggctatcttctcactgtaacctccccggaggaagggttctctctcgggcctcttttaaaagaacactaatcccattcctgagagctccacctttatgacctaatcacctctcataggcccacctccaaataccctcagtttggggattaggattttaacataggaatttggggtgaacacagacattcagttcacagcactattgtattgggtgccatgttcgacacttggcatagattatctcatttatgcctacaaggtaagtacttttcttagcccgttttacagatgggtgaacctaggccccaaaaggtaggcaacatgcctaaggtcccacatgctagtaagcaggggagttgggatttgaacccagccaattgcactttcccttccctttgcactcttaaccccacgccttgagctgggcattcaggactctccacaaccctcttttcatcagcttgctggattccttccacttgtgtgtatgttttcaccaacaactaaatgtttcatgatttgctcgtatacttctttttcttttctcatcctatttcttttccctggagtacttgtcccttctccttgatctcctgtgctttattcatgccttaacataaccaactttgttgcttttactgtaagggagttgctgagagggtttttttttcccatataacacaatgttcttcctatgaacatcgagaatgattatgtcctgaggaactggtctatttttatctcaccagggagctttaaaacataaaaatgtgtgggtccccacccccaaaccacatgtatcagaaaccctggggctgagttgagattcactggttttaaggattgtgtttttctttttgaactggttactagaaagccatgaaccagctctcagctcagctcgggccaggatacaggacgttgggcttcatctcacctcttacctcattttcctttcactttttattttaaattgcatgttgtcttggtttttggtatgtatttttgtaggtcactgatatggtttggctttgtccccacccaaatcgcaccttgaattataataatccccgtgtcaaaggcggggccaggtggagaatcattgactcatgggggcagttttccccatgctgttcttgcggtagtgaataagtctcatgagatctgatggttttaaaaaggggagttcccctgcacaagctctctctcttgcctgccaccatgtaagatgggacttgcttctcctttgccttctgccatgattgtgaggcctccccagccatgtggaactgtgagttcattaagcctctttcctttataaattgcccaatctcaggtatatcttgattagcagcttgagaacagaccaatacagtcacctaaattaattttgtaatgactagaggtacaaatacagatgatgatgatggtgatgaagacaacagatttactctagaataatgagaaactgtggaaagcctgtttgagtcgatctcaaaacagacatcagtagacaacaccatagatgaaatcaaattgtagtctcaggaaaaacattatcttcaaatccagggccaccaatcaccctggaaccatcccatagctgtctaaacgcagtttgcatgtggtcgttcatctgatggcttcatttccttttgacccttcttttattctaattttgctgaagagattaaatgatcgcctgttaaaaaggtgtataaagtggaatcttgtagaagaaataaaaataaatccctttgtgtatttgaatttactgacatacccagtgcctgactccactccccagtgtctgtgattttgggtaagatttcctgcttagggatctggagctagtcaggtaacgaccgctgcgtgcatttagcatgtacgccaggtacagctgcaaggtttccaattttcccgtttgcctgccagccatcaccccagactcatctgaaagccagcaaggagacagtggctgcaaagcggctttttgtcctcaaagtttaggctccttgaggccccagaatgacaaaatggagaggcagggccaggggaagagggcctggtgagacccgccctggctcccgccggccttctgccaatgcccgcagatggtgggggcccatggccgggacgcccgctcaggccctggcagcctcatgtgccccagcacctccttaaaagctgattatccggcttgtctcctttgtgagccggctcattaccatttcattgtgtggtggcaattcttacccgcaccatgaatattgactttatgcttgcttttctacctgaattacaggcgggcaggccggcggctcgcattgcttgctcagctccagcctccctggcagccacttgaatagtctcaaagaaaagctgtttgcttgagcatttagggataacagagagcggtcacaggccgctacagtgatttattaaaagacaggaaaatgagagaaaagacccttacttcttgcaccagctgcctgctctcttgcttccttttattctctgtctctctcctcttttctcttttctctttattcctccctcccttccatcctttccttttttccctttctctgtcttcctccctccctgtgcctccctctctgcctttctttctgtctctttctctgcctcctttttgttcacatttttaaaatgagagagggaaaaagacggctgtgcttttaaaatttgtataaatttatgggatacaaataccattttactacatggatatattgcatagtagtgaagcgtgagctttttgtgtgttcgtcgcccaaatgctgtgttaagcagatgcttgagggacgttgggcttgtttgctacatctaatgacacatcccattaaaggtagatagaacccagggttagcctttgaaggatatgagaggagattgagtacttgcaggtgtgtgtgtgcatttagtgtacacacacacacacacacacacacactgcaaatggtgccagctgttctggaaaaaggaagctctcttctcagaaaaataaggcagggtgtcctctcctctcaatctccttctccccagacatactccagcagtccatgaccttctgagttcctaccctgaacacagtgtctgccatctgaagaggccacccctgcactgtccagcctgggcttctctcaagggaatgatgcatggagagtcttccctccttggtgtgctggttcttccagtcccaggttcagccccatcaccaccccgatggctcctccctacatgcaggaaatctgtgggaagtaaacatggctggagtgtgtgcagaccttcaaagtgaaggctacatcttggtgacaatttctgttcaaccaactgacctattggagcactaagcaagctgggctaggaaggacacgggagggtgggctgggtgaccctggcatgctggccgcttggtgtgagcaattgcatgggggcagctcttccaaactgagccgcaaggactttgtttccagaccttatctgagatgcaggaacatgggcttttcttggtggcttctgggaactttccaaaacgcaattttcttggaattcaaagttggtctgttttgcgtctggagcttgtttctgtggcccctgccctctccagcttgcagtttgcactaagtactcggccgggttcctgcctcctttcactttgctttccccaaatgcctttggtcccccttatcacctgccatgaggctctaattagtctgctcccaaacccataaatcagcccccacctcctccggtttgcttcctctggctgaggcgtggagctcacctttcccttcccagatgacaaatcggccattaatcttggtttatttgctggcttccttcattagcttctgaacagtttgcaaacaaagagggagggatttttggtgacctcagtagagatagggacccacaggtggatttattctcatgtttgatattttttcttctttttttttttttcatgaaaaggctaaatacgtaactgtctttcagcacttgtggtttttcatttttgaagctttcagatctgctgttgggctgcagcgtgcttgtttttatttggtcaggctagtttgttgctatgtatgaatcgggacagggtgacctggggaagtaatggaaagggtggcatgtttgggtgctcagtgactctgaaccttcaaagagggcgctgccatgatgttttaatggtcaacagtcaatggctgcaggagagtcatctagaagcttaggaattagagtgttttagctctttctgttagcttttgggtttcccaagcctgatgttagaatacaccagctccccttcttaggttccatctaatactctggattaagtctctgagaagagagctgaatttatcagctgatatgtgtcttttaggatgcaggaaataaagctggacagcttgtgggaggataggaagggtatcacttgagaaagaatgtctacgaagggaagaccaagttttcaaatgtcatggattagagatgggctacagggaagatgtggggtattgggtcttttagtgtctatctctactttaacccaaaagaatccgtgatgtgggcatttgggcattggaacaggacaatgggcaagatattttcaaggtcttcaggaagattgtgccttacacagattagtgggccttcttgacctcagtgcaatgggataatcttaaaactcaaagcccttggaacacaatctatgaagtggtccacatcaaaatagtaatgttggagttggcaatcttttttttgagacggagtctcacgtttgtcccccaggctgaagtacaatggcacgatcttggctcactgaaacctctgtctcctgggttccaggcattctagtgcttcagcctcctgagtagctgggactacaggtgtgcaccaccacacccggctaattttttttgtattttagtagaaacggggtttcaccatgttgcccagggtgatctcaaacttctgagctcaggtgctccacccacctcggcctccccagacactgggattacaggtgtgagccaccgtgcccagccagagtttgtaatcctgatgctcattgtctggtgacagccatgctaacctctgttttcccctatccaacaattaatttagactaaggattatgattcaatttattaaaaaatgctttttagtcatcagggctttagaaagggagacacatatacgctgtcaaatgtgttcagtaactccatcctttcctcccctacaccctttgatcttgtcagagaaatgatgtctcccccatcattgaagagtccttgaggattggaatatcgtcatttcatctttacgtcatcatctgtttccctgcaatggccagttctttttttcatatatttcaactgatatataaattacttacagtgaaatccacaaatcttaagtgtgatttcaattatttttgacaaacgcatatgcacatgtaacccacaaagcaattccatcactctggaaagttcttttgggtttctcattggacagtctccctccccttgccagaagaaattactattttgatttccatcatgatagattcattcgacctcctttagagcttcatacaattggaattatgtggtgtaaaatctttacatccaacttctttaactcgacatactgtttctgagatccatccatttgtgttgttgcatgtatcaataatttattgctttttattgttgaatattattccattgtatgaatataccacagtttgtttttccattgtcctgtgggtgcataccttggatgtttccagtgtttagctattataaacactgctatgtttataaagctgctatgaacatttttgtttaagtctttttataagctgggataaatacccaggaatggaactgatgggtcacagggtaaatgcatgtttacattttaaagaaagtgtcttttttccccctatatttttatttatttatttattttgttatactttaagttctagggtacatgtgcacaacgtgcaagtttattacataggtatacatgtgccatgttcgtttgctgcacccatcaactcgtcatttacattaggtatttctcctaatgctatccctcccccagtcccttaccacctgacaggccctggtgtgtgatattccccaccctgtgtccaagtgttctcattgttcaattcccacctatgagtgagaacatgtggtgtttggttttctgtccttgtgatagtttgctgagaatgatggtttccagcttcattcatgtccctgcaaaggacatgaactcacccttttttatggctgcatagtattccatggtgtataggtgccacgttttcttaatccagtctatcactgatggacatttgggttggttcccagtctttgctattgtgaatagtgccacataatttccaaagtgttggtatcatttatactttcatcatcaatgtatgaaagttccatttggtctacagcctcaccaacttttggtgtcattgatatttttcattttagccatgctaataggtgtgaaatagcatttcattgtggttttaatttgcatttccttgatcgtaataatattgagcactttttcatgtgcttattggtcatatatatatgacctttatatataaggtgtctgtcaagtcttctgttcatttcaaaaattggtttgcttatctttttactatagagttgtaggaattctttatatgttctggatggacgttctttctatagaattgtaggaattctttatatgttctggatagacattctttctcaaatatagttatctcctaatctgttccttgtctattctcttagatgtattttgataagcagagaattttaattttaattttaatgaggtccaatttaccattttttcttttatatttagtgccctctgggccctttctaagaaatctttgcttactccaaattcaggaagatgttattctatgttcttttctagaagcattatacattagatggtctagtcaattcttaataagccaagcaaaataagaaacccaaacaacagcttaactaagcaaccaatccttaaaagaaccaatgaacccactcaccaaccaaccaatgaaccaactgggcaatcaatcaatcagaagaatttgttccaatgcctttcagcggggtaagtagcatgctgtaacttgtatgtttggaacagatccacaaagtgtgtctgaattccatggtttggcagatgactgactaatccacagaatttctacccgttgagggtttgccagcagagtccctgggttactacttttatctgagctggctaaactcttagtggtcattctgaatgagcagtcaaagctgaccgaaactgctctgtgtgtgttgggggaggggggtggtggggctgggggatgacagggtggagcaggtgtgcattgctttcttcctagtacttggaagatagttatcattggaaggatttttatatatgatgtctgagtctcatttaagtgattctataactattgtgcttcagggagggtgttgtgtgttgaggaggcttctgcgggctgggcaggacaccaatcctctgtgtatatggctcctgtgtacttgcaaatgaatccagcttgtggaaaatgaagggacctcttgactgcagtattctttgccctgtcacaggtcctgagacatgagtcttgaccttggagaatttctagactcgctctgtatgtgtgccctctcccttccctaatcccaggcatcttgggtttggctggtcttggctacatatctagttaagtgtcagcactggtattgtaccagcctagctgcttgggtcagcaccttaggcacagcccagagagtcaccttagtatttaatttacctctctttgccagtggtgtggtgtaaatgattaatgtcctgtatttcataattgaagataatactgttccagataatttattttattttaagtttacagtttcttcttgctgtgcttgtggacttatgcagttagattctgtcatttagttattagacatcacagaaaaagcttcagcattttttgagttatcctttttttaaaaaaagaaatgaaaacacatctctggagagcttcagtgattcataggagtcatcctactaggtagtgtcagtggctggatgactgggactgaagcctcctgccttctagaccaagatttatgtattttatgtatatggtctttgtgcaaatacagaggctgggagggctatgcgttatgatgattggtttttttaaatcccactgataatctgtggccataaagagtgatacttgaagccgagggttttgtatctcagttggatggtttggtgagaagataatttaacactgttagacactgctaaaatttctgtggccaacaaatttggtatccatctgttcacttcaaacgtgttatttctttctttgtggcttccgtatttgatagacctaaactctgactccttagcatttcagctttaaggtaaaagaggagagagggagctaaccaccaccctgcctctgggtctcaggagacccttctgttgatgtctgtgagagtgaatatgtgtatgtgaggagagaagtggccttcgggttctgagtctgctggctatagtagaagttgaccttgactatgaaatggagaatttaaaaacagctttacccaagggcccaaagctaatgattccgaagtgttgactaaggtatcggagtaaacaatagcaggctttcatagtgtttacttagctctgcagcttacaaaggaattgtgtgggctttcgtccacaccacgttgctggcttatatcacaactgttcgttttgaaacaacttaaatgattttgaccttttgtttaggttgtgggtcagtgcagaaaggaagttttctataaactaccatgatgtttttctcaaattggaatgggcatgtctttgattagaactcatttcatatgtaggaatggcatccgcagactggatagagtgttgaacgagaggggcatgtgccttcaacttgtcagttgctcacactccttattttgcttaatcaaaagcatggcagaagatgtgaggtgtttatctataatttaaatcatctgagtgaagcacatcttacttcaatgtgcctattctattgcattttcataagcaacatgaggcccactggtcttacacttgaagactgctgtagtattttctcaaatagagacattttatcaaacttcatcaaacaaggtcattttgaactcctaattgcacatggtatcatttttaaagaggtttgtactatattaaaacataattacccacaagggctctctgcctagagctaatacgtgaaaactgatataaaaagtagcatactgaatatgctagatgttatttttcttcattttcctaaattgttttttagatgtgagggagaaaaatgccaatatactttatcagtccagtttgactaatattgagcctcaagttcaataggcataaggaatgtaaattaggctcaagcaatgtaaattagtgggccttgtggacctcagtgcaatgggataaccttaaaactcaaagcccttgggacacaatctataaagtggtctacatcaaaatagtaatgttggagtttgtaatcttgatggtccttctctggtgacagccacactaacctctgtttttccctatccaacaattaattttgactaaggattattgattaaaaaatgcttaaaaagcatttaaaaagggaggccacatatatgctactaaatgtgttcagtaactccatcctttccaatagcagagctgagatgaagccccaagctttccaatcctgctcctggccttgtgtcagctggccacataaggggacaacacctgcctcaagtgggctgtcaagtgtttctactctgagctaaatggcaaccctcctctgagcccttccactgtgttcacaccttatcatggtcatctaagttcattcccgcccccacttcatcctgctaccacacagatcattagataccaagaagttgccactatggaatttctcctgcgactccccacattccacaggttttctgaccttttctcaatgcaattcacctatcctgtgtcctgttcccccagagccaacctcgatggcttgaaaagtgaaaaggagctaacaacaaggatttgtcatggtgtcatgcatgtctgagcccctcctggagagcagaggcctttcttacatgcattgggtcaaagcagggatgatgggaatttggggtgacagtttatgtcagaggagatgcatgtgaacagagagacttttctttgtgcacctcctatcaatatggatgggcaatggattgcaatgtggcaaacaagcaggggaaccaggagtctgtctcaagtcccacagcttggccatcatgtcactttctctctctcatgcaatttctctgcattagtttcccagggctgccatgctaatttccatagcctgggtgacttaaaacaacacaaatctattttcttacagttcaagaggatagaagtctgagatcaaagtgtgagtagggccatttttccctcggaagacttcagggaaaaacccatccttgcttcttcttagcttctcgtggttgctgggaattcctggtattccttggcttgcagctgtatgactccaattgctccaatttcttcctttattgtcacacggctgttttccctctgtatgggttactgtctccaaatttctctcttcttataaggacatcagtctttggattagagcccaacttaatccagtgtgactccattttaaatcaattatatctgcaaagatctaattttcaaatgaggtcacagtcacaagtattgggggttaggacttttgggggacataacccacaatgtcctctgaatatatatatatatatcctcccatatatatatatatatatatatatcctcccatatatatatatatatatatatatatcctcccatatatatatatatatatatatcctcccatatatatatatatatatgtcctcccatatatatatatatatcctcccatatatatatatatcctcccatatatatatctatcctcccatatatatatatatatatatattttcaatgtatccctttattcaagtgattttaagcaatgaaagcaagacagctgttataggatttacctttctagatggaaaaggacaagtaaataaggtcttaagctccatgtcaagaaaggggcacaacagaacaaattctgccttggtgggcatcagtcttctctttctgctgtgcaagctcctggttctgtcttctctgtgctgtgccttgttctgtgtgatcacaatccagcagtcaaagaggcacactgggcttcttcattctcagctgaatccctcgttgccacttctgcctatatgggcaggcttaacgggggtgacactcccgtgttccttttgtcaaacatcctttcttctccctaccataccactgatccacattcttccaatcttttcttgaggtctcagacatcttaaaaagtccttaccttccaaatgtattcccacattgactctttctcttcctttccaccctttaccctagtccaggccaccagcacttcttgcctgtcctgctggcagtagttgtccaatgggcctgcctgctctcctggtcttccccctctgccacaaactcaccctaagcagccagggcgatccttctagaagagacactgtactatgtttttccacttctctggaccatcaagggactttgcaaagcattgatataaaccccaaaattctcccatggtctacaaatcccttggggatcatgacctgcctgaggactacctctgacatgtcatctcctactactcacccctttgctcatccatacatacaccctggcctctggcctcttctcaaacatgccaagcatgcatctaactgcacacctttgcacttgctattttctctgcctagaatattcttcggcagtgaagtcaaatggctcagtctcttgcttcattcaccctgttcagttatcacctctttccctagtctctttctcttacctggttttagttttctgtatggcgcttactattatctggtcttataggtatatttgtacttgtgggcaccttgatataatccctgtaaaatataagggttcttcatttggggtccatagatctctacaaagtgtgagtagaattcaggggggctaaggtaggcttaaaaatgactcttccaagatgtgctcacgtcctaatcctcggaacctgttcacgttgccttatatggagaaatatgggaaaaagttaaacatctttggagcaccagcttatcctggattatttgggtgggctttaaatgccatcacaagtgtcctcatgagatagggagagaaagattaggcacacatacacatgtgcacacatgtgtgcacacactgacacacaaaaaagaaggtgatgtgaaattggaggcagagaccagagagatgtggctataaaccaaggaatgcctgcctgcagcccccagaagctgtgagaggcgggaagcagattctcttctggcatctctggagggaagaaagtcatgctaacacattgattttgaactcccagcctccagaactgtgagagaataaatctctattatcttaagccaccaagtttatggtaactttttatggcagccacagaaaattaacacagggtctgtgaacatggatggaaaaagttatatctttattttaaggtatctctaattgaaacttagcatgtccttcaatcatgaatgcaagaaacaaaatgtagttttagtgggatctgtgattttgtcaccaattgaaatcacagatccttgcgtatcataggacagacattacagagaccttgaaatatcattgacacttcttgatactttgaaattgcagtagttattaagcctatgcaatttccagattattaagcctggatctagtcattacaaagtgttaataaaggtatacattaacactaaactacaattttggttttaagtagtttgagaagtattttaaaaatataattggttacctttgtattcttatctattttgttttttatatccaaaacagtctgacgaaaggcccataggtttcatcaaagaaagtcaggactatctggaatggataattggtcccaaatagtggaagaaagaaagaaagaaagaaagaaagaagaaagaaagaaaacaacatgaataattctagtaaaatgtgctcatattaaagagggaaattaaggcccagagaactgaaattgtctgcggttatagcagcagagaaaagacttaaagccatatcctctagggaccacttttgcttgtattgtatacttcaagatcagttcaggtcctgcttcctctagaaaaccttgtggagaaacttcactctctacagttcaatcccctgccttgctttacctgttaccccttctatacatcttatcacttgattccactgaaggcagcccttttgacattccattttgtggtgttcccatctgagctcaatgcctggtatataaaaaataagtgcttgttgagaagtgaaaagcaaatgtcttccaatttttaatacatgtgagtatcacctcctgaacaaaaggaaaggcacctgcctttgttttttgtttgcgtttatacaatttataaatgcaccacaggcacatagtaggtgttcaatgaagatgtattcaatataattgaatttcctggtagctgaacaactaggcagatgggtggagagatataaattagtaaagcagatttaaaccatgtgttgatcattgaaaagttgtttcattttcagccaagataaatgcttttttaatgtgtaaagaaatctataattttctatgctttgaattaaagctcccacttcccaggtttcctgcctgcttctggctgctcttaatgagctaatttaccccaccgaggtgagagatttcctcttgggaaagggtttagatgtgcctctctcatatccagggccccagagcgtttccttacagggctttaaacactctgcccgtatttaagagagaagccaaggaacaaatctgttgttttagctttattccttgaggctcagcggctcgactttccttcccctttgatcgctctcactggagtggcaggcctggaaactgcggagaaggggtaggtctccttaggaagcccagttcaggggacccacccagctccacacaatgaaaataaagttgtcaagcctttgaggtggctgtgaagatttattcttcctgggcaaattggtgagacatttatatttttaaaaaatgctttgatgaacttgataaggaagccctcgtttgaatgtggaaaaacattctagagctttttccactgctacacagggtttttagctttaacctgtgaaaatggactgggttttgacctgggttttagcttgacctgtggaaatggacttgcccttcagatgaatgacgagactgtaaggggttcatttggggattgcaggacacaggtttaccctgtcttagaatataagcatccatgaggcaggaggtcttaaaaaccttttgcagatcttgacatcttatctacacatttcctagtcctcagctgccaaccaaaatctcccaattgctctattacagctcaatgacttacatcaccaagtatggttccattacttctaccagctgaagcaatggaatatgcaatattttattatgcatataattgaaatactttctgttctttctaagttcgaatattgtttgtgtcacatattgttctgagcatgccttggtcacagtcaggtctcgagggacctagggaaggaagtggaagctggtgtgaaatatccttctcttgcattccagaaagtcattttagccaggaacatctgccaacagctctgagatggtgctcttaacatccctgtgttatgcagaccattatgaatggctctgaaaagactgagtgctcggccaaaaaaaaaaaaaaaaaaaaaaagaagacatggacacatttatcagctcttagtggtggaaattctgcaatcattggaggattttcttggaaaaatcagagaactgtccttgaattctgttatcggggtaactctgtcttgggctgcaacaggcactgtgctctgtggagagcccatgggcttgtgacagatggaaccaggtttagattcctttgtgggaacttattttctgtgtcacctagggtatattcttaattcttctttttcaattagctcaactgtagtatcaaagtaattgcactttgctggttgcaacctttcaggttgtaaggatcaaaggcaggctcaggttaccctggagatcagggattactaaaaggaatgcaggcacttaaggaaacgtagcaagtgatcactacacaggatgcagcagaaccttcctaagaagctctgccaccatattcatggtagagtttcttcctgtctcatcttccctctttatgtctgtttctactctgccaacacagctttttttttttttttttttttttttttgagatccaccatacctaaaatccctgtatcagtcagtcaagcttccatcatgtaagacctgtttcactgaaagggttcactaacaagagtggcaggaagggattatttacaaaactatggtcggaattaagggaaccaactagggatggtgaagcacccagcgtccagcagaagtgggaagccattaccacctgtagggctggagaaaagagctgctactaaaatgccagagagttgtagccaaggtggggatgctgattaatagaggctgtggaccctgccaaaaccatggccacatggtaagggacagatgaagaatacataccccaacttctctctccttcatcatctgatcgccttccaatgcttcccattggccacacctaatgggaacaagacagcacaggcaatgcagtttatagagctcagccttcagggtacatagcagggcagagaagagtggagaatggatctgaaggggcaggtggagcttaccaaggacagtcccttactgagcaacatagctgtgtttaatgtcatatgaccctattggccttgcctttgcagatggttccagggatcctgaatcaaatgcaaccatccatgggctgagctagctctgaggaagcctaaaatgagcactctaaccagtggagggtccctaatgggtggtcacctcctgactcaatggtattctctctgttggtgaggtttaaatgaaagacagagacagggaaagagtggtagaaagaagaaaaaagccatgttgggccgggcgcagtggctcacgtctgtaatcccagcactttgggaggctgaggctggcggatcacgaggtcaggaggccgagaccatcctggctaacacggtgaaaccccgtctctactaaaattacaaaaaattagctgggcatggtggtgggcacctgtagtcccagctactcgggaggctgaggcaggagaatggtgtgaacccgggaggcggagcttgcagtgagccgagatcgcgcctctgcactccagcctgggcgacagactgcattgcctgtgctgtcttgttcccattaggtgtggccaatgggaagcattggaaggcgatcagatgatgaaggagagagaagttggggtatgtattcttcatctgtcccttaccatgtggccatggttttggcagggtccacagcctctattaatcagcatccccaccttggctacaactctctggcattttagtagcagctcttttctccagccctacaggtggtaatggcttcccacttctgctggacgctgggtgcttcaccatccctagttggttcccttaattccgaccatagttttgtaaataatcccttcctgccactcttgttagtgaaccctttcagtgaaacaggtcttacatgatggaagcttgactgactgatacagggattttaggtatggtggatctcaacatatatcatgcatgggctatccaggacaaacactcaacttcaggggtagttgtaagaattgagtttatgttcctaaggacctgatgcatcaggggactcaacaactagcagctgctgtcatcattacttttgccatgtctctgtggaagaagctaatcaaaattatgtgtttcagagacataaagtcttcacacatgtcccatctagtttcttcagtgacttgaaagtagtcacttccaaaataatgggaatgatgtttgtacactcatcggtggcccgattctcaaatgaaatgatgtttaattttctggagcaaattcagagagaaggggatgtgacaaagttttgtgagatatcatttaagggcatgatatggagcacctatcattatcgcatgactgaaacaacgtgatagagtgaatctcagctgaggtcggaggagacaggagaggtagctcagaacgtgaagaagtaaagaaaagggccgctatcattggattgttgctgctgtctcgttgtaataaaaattttgggcaaccaggaatctgcgacagaatatcaggaaagatatcacatatatagctaatcagaaaaaaaacaacaacagtgtgttagacatggaaggttttcagacatagcccagttcaagtgtctttttctacaaatgagcaagctgaggcctcgagggctccatgcctaggtcaggaatgacaaatgtgtggtgcatgtgtgaccacccgttctcccatgcccgggatacacacaaccaactgaccatggcgattgtttccgccaagcccaaataagacctaagacacctccattcagtgctctaggcaggcaccagcaatccagctcatcatagacactgcaactcatgtgtcatccctggactagaagtagtctctcacttctagacgtaaaattcagtgattataactcttgttagtgacagagcaaaacagtccaattttgccttttaagtctttaattttcaagttttatctgcatgtggattatctggaatataatttgtaaatgacatgtgtaatttatacagatgctgcagccgcaggcatgagaggaaggcaggctggatgtctctgttcaacatttgtcatccagtctgaaagtttcccaggcatgatttatctttttctctttctgctaccttcctttgaactatttatccatgaattaaaccacctccatagaccaatttgaggaagctcgcatcaatctattcttctctatgtttggctaaaatgtttagttgaccccacatttctagatcatttgctgttgtgctgaacctctatggactccagtggggtaggcaccatgttcaagcggttgaagaagagacccagagccagcaaatgagacatggggttttactgggggctacataccggggagagagtctagtggtggtgagctgggcaggagaactgccttacatacggtccagtggcggtgagctggacaagataactgcatggcccagaggtggcagactaggtgggaaaaccacaacagcttgcaaaatgcatgcagtttatatagtgtttccacttagtgccttcccactaacaacctccacctggcaatcatcattcaacctaaaacttggggccttgatcccctatatggccagtgttctatggaatgggacagggactcagatgttccttgtagacaaggaaggaactctgggctggcaactcctggattccctagctcagaacacacattcaggtccatcttccatacagggtcatcctaagggtatgcctaagttattgctatcagatgcatttatcatacatttgcttccagttttagtcatctattgtcatttatccaccattctggtgaaggacagcagtggctccaacgaacaattgtgcccatttactcatgatgcacaccattcagcaatttgaaagggccatgaaggagcctcagcaaatctaaatctaatctaatcttttattcttccttttgctctcagtagcctatgtgttgaaccatgtgaacttgctgatattcaactgtttttaaactacaaaaatgtcaatttcacatggttcaatctaaaatgtatcacttacacctttgcacttttgtgcagaaatctctgaaaatatagatgcacagagtagattttagtagttaataatactttttttttttttttacctgagagcgattatgtactatgcagtagtgaccagagtcacctgctgtcattaggtcagtgtcaggttgagagaagggaacccagagctggggcctgtggcacgtgcctgtaatcccagctactcccgaggctgatgcaggcggattgcttatgctgaggagtttgacactagcctaggcaacataacaagttcccttccccccacctctcccccaaaaagagcaaaggaaatcctaccaagcttggcaatccattctgtgctactcaaagaagataagacccagacagggcagatgcactgaacaactccaggtggtgccttccacattccagttaatgtgtgtaatggccacggaagcaggagtttattttcttcctacctataacctaccaccctgtacagtatacattgaaaaaatgggccccaaagacttaaatgtttaacctgagtggttgttggccagggtctctatggagcctctgatgttaatgagaaaggtcagacagatacatagaaagttcaggagtcttaaactgtctgcctattgatcccataagttggtcaaatggttttgtttggagttttgtttcacccaattgtctaaaacctttcagtttcattcattctcattatgtgcatggatcccatgaaagtggttgccattttggtttttaatttagatgcttcagagataacaatgggatatatagtaggtaggaacttgggctgtatcctttggaggtagatgaacaaggttctcaatccagctttgctacttctaaggctgtgagtgtaagtaattttgcctttctaagcctgttttccccactgtgcaatggtgatagtaactgaacatacttcataagtgatttgctaatgcacatgatgtgctttgtaagaggtacctagtacttaaaaacgttagtagcggccatcactcgtacaatacttctccaacacagtttgcaaagcggggtgaacgtgtgccctgccaaaattcttttacaagcttgctgcatcattcccagcttctgccaacagcttgaacctgtgaccttctgaaagttacctctgggcacttggagatgctttactttccgagagccataagtgcctgggagtgtacatttccaaccaataccagcctgaccatctgtagccaaggactagctagggtacgactgtgaaagccctgctcctttgccttgattcaggacaaactctgaggtataatttgtgctctagcgatttatgcaagctgaggcagggactggaaatttgtagggaatatcaactctggctccacttcttccccttttcggtccagcattccccacctggtgctttctggtagcacttccttaatctgtgaatcctggcctcagtctgcctcctagcaacctgactaactataaacgggactgtgtttcacctacacaaaacgtcaggtaggattcccactttaccgatgtggaatatggaggctcacctgacttgcagaagttccctcttgccagtaggtaacaagcagcacctggctccagctgcgctgtcttgggaggcacacctgatccaagtcagttatctccattccccactgttaattttaagactaagcgaaaggctagagtggctgatcttataaggcatttggtattgagaaaagagaggaaaacttaaacaaggctaaagaaaagggtcgaaaatcttatcataaatgctggatcctgttgcttttgaaactgcatcgtagagagtattccctgatatcagcaagaaggggctgggacctgagggttattgtatttctacatgcagactatactgcagcctgcttgatgctggcatcggcttgcttcgtgcttaaaccgcttattaaagtctagacgcaacataaaagcacgtaaattggttccagccatctctagtaaaaacttcagctggagctgggaagtgattggagcatctcttggtgtaattaaaattgactcttaaagtttctttagcttaattggtaacactttctttggaggttggtgaaagcgtcttgctgggaaggttaaatgcatttctgtgtataagaacagaattcaaatatagttttatggacacatttacagttatgttctacccgggtggtcttttttccctgtatcttttctatttaagatttatgctgtcattcaccacagtctaaatgtgttttgataaaaggaaaaaaaatgaaccgttgctgacgcatttcaaacagacagttggtaatattttgaagctttcagtaaattgaactgcagtttggcttaacccgagctccttctttcccccaaacccttcacttagagtctagcgcttaagctttgtttgttatccagaaattaaagtagctactactatttggctgtgtccaaaggtaggaaaccaggcattttctaagatagccacgcctttgctgtgaccgaatgcctttgacccccattatttgagaatgaatgtgtttatgtgcgtggatatgtttatatgtgctgggacttctcttctttggcattgcttcttgagggtcttgtcagtgtgatacattctgataggcaaaaggcctaggctttccatttttggagagtaatcatggacgaagcttccaattctctggactgtccttaattcagacttgggagaggacctgctttaatttacatttgtgaacattgactcttcatgatttccagggcaaggatttgatccttattgtaggaatctattttgatccatccctatagagcagagggactaccttccttgaaatcagttcaatattatctctttgtgtgtatgtggtgttgcaaaacaatgttatgaagaccataaaggaaataaaaatcactctgattctaggatccaaatgcaacaactgcttatatttctgtgttttttttcctaatacttgtctacaggcttatatagtttcagtttttgttatataggtataatttttaaccaataatcttttaaaaaataccgagttaatttttctcattaagtacgtacttgttatagaacatttaaaaatataacaaagtgtagtaccaattgctcaaacacaatgcttgctaagattttagtgtttatttcttcaaacttttatatatgccttgctttgcctcttctatgtgcaatatgaacaagaattgtattcatattgcatatataattatgatttctgtctttttatttcacatgattttaataatatattattataaatttttgataaatatttaaatggttacataataatatgctacattaacaggctgtaatttgctttagcattcttttactagaagataatgttccattttattttttgctattgtaatgctacaaatgggcaggataattctaaattcagatttgtttgttttctgcatccagaattatttcctttccatagattccaaaagatgaacttatatcatcaaaaggagtgaaaagatttaaggctcttgataatattgccaaatgtatttccaaaatgttctatcaatttacagtcttattagcaacatacagagctaccattattggttatggccaatgatgttagtgttttaccattttggtagaaagcagcatcttgttcagtttgcatatctctggtgacaataaggttgttctgtttcctttgtgttatctaattccatatcctttcaaacgaatcatctgttctcatcctttgctgacttagcttttgaatttttgtactttaaaaaacattgatctgtgatatatagtatacatattaactatattttgatctttttttatattttctgcaatttgcaagagcagtgttttgtttacttggtatgttagatgatgtgagtgtaaataccatttctgcatactttgtggtgactgggcattctgggagggcagtagtgctgtcattgagatgacatgatctctgtttccagggagaccgacttgcaccccagctctgatactagtgatgcctttcacatttcaggtgtcaagcccagattttgctcacatcacttctttccatatggaaatcctacataccctttaaggcctaggtcacatgtaatctcttccagtttcctggtctccttccattgcttcttcctggttagtaatcccaaagatctgtgcttcattcgagagagaacccttctcaagatctggaggagaatttttgggggaagttttcctgggagttttattttcttatagaactaccagtaaagttattgaagtccatttaatgattggcagaaatgaatgtggatgggataacttgattttaagctgaaagaagaggaaaaggatagttttttctatcttgttttgcattctttttcacctcctgcatatagttggggctgtgtgtgtgtgtgtgtgtacatttttgtgtgtgagtgtgtgcatgcacccaagcctagattccactgaaaagcagaaccagaggcaaggggttgcgtgcaggttgttttaggaaatgattccagggatcagaagcaggagattggggagagtgaagtagggaaagaagaaaagccaatttcatggtgaattattgagctgattcttgctgtgggtactagggctcagtccagagcccccagaagccatgcaggattgtcttctgagaagaagggagtatttctccactggtttccattactcatggtcaaggatgccccatgagttaattcccttacacttctaagtttgcatgtgtgccagaatggctggttgggttctttctggcatcctacatgactgtggcatagaaaggcccagtatagaaagtgagaggtacatgatatagttgagctgaagtgctgtcaggttacatcacatacatctggttgcagcaacaatgctgtagtggaaagtgggggtggtggtaagagaccctaggaagtgcacaagaggagtcagacatggtgtgcatgtattataacctcatgtgtgctttccctgtttaattaggtagatttggagcctgggtggatgcagcatctatttaatcttgatgtttttctttgtgaacccacacctcactttctttcagtgaaggtgtcccccattcactacctccacctcttatgtcctccaggcctggccaatgagaacattgcatttccccaaccaaagtgattgactcagggacggggatgtgatacagccagaatcgagagaaccaatcaaggctttcccaggactaatggggaaaaaacaccttttctttttctatttggaagatgtaagactgtagcttcaggggtaccactcagagcttgaaaaaaaaatgaataaagcaggagatggagctgagatccagagaaaaaccaggtcctgatgggatggcattgtttgaattcttgaattcagccacccatggaaatttcaagttacattaaccagttaaatacttgtttttgctgaagccaatttgataaggggtttccatcacttgcaaccaaaagataccaatagatactttgagtttactctcatttaaggtcaatcttactttttattttacttcattcattcaaataatatttaatgagtgcctactctgtacctgatgttgtgaaaaagttcagcttccagttgcatggagaagaaagagatatgtaaaataaagctcagctctactttaattttctggaatacagaacaaattacctttaggtaggtatgtctttgagcaacagctgattgccagaaggcatagaggaagtttttggctctaaaaataactcaagagatgagagagattcaagcctaagggaaattgggaggggtgggagggaggaggaaggacaccttttattgaaaatatataatggtggtaatatttgcagagtatcaagaaatggtcacaaatataatttctattacatgatatatcagttatctattgctgcaataatgcaacatcacaagtagccatacagcttcgcatgcatgtgacaataaacctttttgttcataaatctatggtttggctgagtggttgtgccaatctgagccaggcttggtagggcttactcatatgtctatcagcttgggtttggctgggtaactttgcggatcttggctggacttcctcacatgtctgagaccttgactgggacatttggggcctgctctacatgtctctaccttgagcagtttagccaaggcatgcttatatgtgaagctgaggagcaacagactaaatggaaacccatttcaagcctttgcccacatcacctttgctgatatttaattgaccaaaacaaatcacagggctaaatttagggacatgaggcaggcactacaacattatatagccaagggtagagaaccaggggaaggtaaagaattgagaccatttttacaacctgtctaccatacttggttggcttatacgtagtttattaaaattaatattagtataattgatttgatttgttgaaatgtagttcatttagtccctgagttcccagaaaaataaaactcttgacagctgagtcttggtcaaatcagctcccctctaaacacatgggggctttgccttttctccataggaaaaccccaatattttggatttgttaaaaacaaaaagatgtcttttggatttaaaatatgctacctttctttacagagtttagatttcctaagctggaagctatgtatacctttttcaccaaggtcagctctgagcctatgatattcactgtctttgtgaacaaattctagggctctctactatgttccccttccatatttcagatagggtcttaaaaggctgattgctttggatatgcacggatcagagaatgattacaattggctttttaaagaatttattatatttttactttttttctgatgttatggatttatgtaatatttgagctttgtaatccctgaaatttttacttaaaataaatctcagggtttttttccctctctatcccttataggtttccaactctgaagggtggttgagctcaagacactgaataggcccctatatctagcaaccatttttgtttaactgcaagagttttgaaagttggtagtctaggtttgaaaccaggttctactgttattattagttggatagcttaaagcaaatttttcattttcagcctgagcttacctctctgaaaaataggtgtcacattacctactttatagtgtgaaacgagataacacatgtgaagccctttgcccagtgctttacaggtagttagtgctcaataaatggagactgttcttagcctactttgtggcctccagttcattgccatcaaaagtattttagaacatcagcttctgtattagtctgttctcacactgctaatatagacatatccaaagactgggtaatttataaaggaaagaggcttaatggacttacagttccacttgactggggaggcctcacaatcatggcagaaggtggatgaggagtgaagtcacatcttacatggtggcaggcaagagagtgtgcagagggaaactcccctttataaaaccatcagatcttctgagacttatgcattgtcatgagaacagcatgggaaaaacccatccccaggattcaattacctcccattgggtccctcccacaacacatgggtatgattacaattagaggtgagatttggatgggacacagagccacaccgtatcagccttcctatcctgagaaaccttgctcaggctggtgatggaagctcagaaactatttatataagacacttcccaaggaggacacaagcttgggagatgttgacaggaatgactccagcaggtgggaagttgcaggaggaaggacatggagctgactacttgtcctgctactgtgggaatttcatgtgtctgttctcatcattattcagatgctctgctcatacctcaagcctcttatttgcataattcactcccccgtttcctttcaagtgtccctcactctcaacaagatgttatgaatttgtttgctcttgcttctctagttcttttaattgtgatgttagggtgtcaattttagatctttcctgctttctcttgtgggcatttagtgctataaatttccctctacacactgctttaaatgtgtcccagagattctggtacattgtgtctttgttcttactggtttcaaagaacatctttatttctgccttcatttcattatttacccagtagttattcaggaggaggttgttcagtttccatgtagttgtgtggtttcaagtgagtttcttaatcctgagttctaatttgattgcactgtggtcttagaggtgtttatagtattctttgatggtagtttgtatttctgtgggatcggtggacaagaaataactaagatcagaggagaactgaaggagatagagacaggaaaaacccttcaaaaaaaatcaatgaatccaggagctagtttttttttttgaaaaggtcaacaaaatagatagaccactagccagactaataaagaagaaaagagagaagaatcaaatagatgcaataaaaaatgttaaaggggatatcaccaccaatcccacagaaatataaactaccaacagcgaatactataaacacctctacgcaaataaactagaaaatccagaagaagtggataaattcctggacacatacaccctcccaagactaaacaaggaggaagtcaaatccctgaatagaccaataacaagttctgaaattgaggcagcaattaatagcctaacaaccaaaaaaagtccaggaccagatggattcacagctgaattctaccagaggtacaaagaggagctgatataattccttccaaaactattccaaacaatagaaaaagagggaatcctccctgactcattttatgaggccagcatcatcctcataccaaaacctggcagagacacaacaaaaaagaaaatttcaggccaatatccctgatgaccatcgatgtgaaaatcctcaataaaatactggtaaatcaaatccagcagcacatcaaaaagcttatccaccaggatgaagtaggcttcatccctaggatgcaaggctggttcaacatacacaaattaataaacgtaatccatcacataaacagaaccaacaacaaaaaccacatgattatctcaatagatgcagaaaaggccttcgacaaaattcaacagcccttcatgctaaaaactctcaataaactaggcattaatggaatgtatctcaaaatagtaagagttatttatgacaaacccacagccaatatcatactgaatgggcaaaaactggaaacattccctttgaaaaccagtacaggacaaggatgccctctctcaccactcctattcaacatagtgttggaagtcctgacaagggccatcaggcaagagaaagaaataaagggtattcaaataggaaaagaggaagtcaaattgtctctgtttgcagatgacatgattgtatatttagaaaaccccatcgtctcagccccaaatctccttaagctgataagaaacttcagcaaaatctcaggacacaaaatcaatgtgcaaaaatcacaagcattcctatataccaataacagacagagagccaaatcatgagtgaactcctattcacaattgctacaaagagaataaaatacctaggaatctaacttacaagcgatgtgaaggacctcttcaaggagaactacaaaccactgctcatggaaataagagaggacacaaacatgtggaaaaacatacgatgctcacggataagaagaatcaatatcatcaaaatagccatactccctgaagtaatttatagattcaatactgtcccaatcaagctaccattgactttcttcatagaattggaaaaaactactttaaatttcatgtggaaccaaaaaagaggccacatagccaagacaatcctaagcaaaaagaacaaagcgagaggcatcacgctacctgactttaaactataatacaaggctacagtaaccaaaacatcatggtactggtaccaaaacagatatatagaccaatgaaacagaacagaggcctcagaaatcacaccacccatctacaaccatctgatctttgacaaacctgacaaaaacaagcaatggggaaaggatttcctatttaagaaatggtgttgggaaaactagctagccatatgcagaaagctgaaactggatcccttccttacaccttttacaaaaattaactcaagatggattaaagacttaaacataagacctaaaaccataaaaagccttagaagaaaacctaggcagtaccattcaggacataggcatggacaaatacttgatgactaaaacaccaaaagcaatggcaacaaaagccaaaatagacaaatgggatctgattaaactaaagagcttctgcacagcaaatgaaactatcaccagagtgaacaagcaacctacagaatgggagaaaatttttgtaatctatccatctgacaaaggactaatatccagaatctacaaagaacttaaacaaatttaaaagaaaaaacaagcccatcaaaaagtgggtgaaggatatgaacagacacttctcaaaagaagacatttatgcagccaacaaacatgaaaaaaagctcatcatcactggtcattagagaaatgcaagtcaaaaccacaatgagataccgtctaatgccagttagaatggcaatcattaaaaagtcaggaaacaacagatgctggagaggatgcggagaaataggaagtcttttacactgtttgtgggagtgtaaattagttcaaccattgtggaagacagtgtggagattcctcaaggatccagaactagaaataacatttgacctagcaatcccattactgggtatatacccaaaggattaaaaatcattctactataaagacacatgcacacatatgtttattgtggcactgttcacaatagcaaagacttggaaccaacccaaatgcccatcagtgatagactggataaagaaaatgtggcacatatacaccatggaatactatgcggccataaaaaaggatgaattcatgtcctttgcagggacatggatgatgctggaaaccatcactctcagcaaactaacagaagaacagaaaaccaaatacggtatgttctcactcataagtaggagtcgaacaatgagaacacatggacacaatgatgggaacaccacacactggggcttctcggggggtggggggctaggggagggatagcactaggagaaatacctaatgtagatgacaggttgatgggtacagcaaagcaccatggcatgtgtatacctatgtaacaaacctgcacgttctgcacatgtaccccagaacttaaagtaaaattttaaaaaaatttaaaaattggcaaggtttggtatcctgaatacatgtagttaatatgatctcaaccttgaaagaatagtacatgcacccataagaaaagtctgtaaaaatataaataaaagtgttaacagtatttgaggaaaaaaaatgttgtgaagacacactgggagaaccagtagctctcaaatatagctgcacaataaaattgcttgggaaactttaaaaaatcctgatgcctgagccctaccttaaaaattctgatttactttatccgaagtggggtttgggcatccacattttaaaaagttcttcatgtggtgctcatgtgtctctagggtgagagtcacccagccaagttattgctggtgtttatgcaagatttcattctactctttatttatgatcctacttcttgtcatttgattgctccagcctgcaaacattccctttggaagagggttgttttccgaataggtaaccagcattccctggtgaataagctaacggctttatcacgatgttctgggagctagctatgcctcatgatattgttaatcttgttgtaggctgattggagaattttcctttgtggccccctaaatgtccttctgaaaagtgatgataacccacatgtttgcaacaaaagacaattccaccatacacttgggcagtgacgtatactcttccatgagcttctatgtttgctatgagagctattacagtaggacttgaaaaaacttggagttagaatttacctacatcactaatcaattattgtaaatttggccaaagctcttaaattcactgaatttaaataaaaataaattctttgtttctttactttccctctaaaaaattccagtgtgatgtatagagtagttatcactgggtctttgtcctacttggcagatgaggaaactgagctgaaataaatgagaattagaggatcagctttgggcggatgcaacaggtctctcctcttcccactcccatgcctttgcctcttccattgctcctaggcggcagagatgcctatgggcaatggattacctttcacgggtgcagtcaatgagtgctgggagaaggtcttctctattctacaggcacttgcatgtctgttcttctgggcttctttgagcacagagtcagagaggagggatggtagagactatctagatgttctttaaatgtgtattcattgcttcctggcacacagctaagcaacctttcctagcctcccttgcagttaaatctgatcactggttgcactctggccaatagaatgtgggtggaagtgatgtgtgctgcttccaggccctcaaaagctcccaggagcaccctctaggggtttccacatctgctttttccatcatggaaatcgtgtatgtgaagatggtgaaggaagaagatagaaggaacctcggttcttgattcagagcttgaagaagaactacatgatcaagaaaatctgtacgaaatgattacatgaacaagaaacaaaaacaaaaaaactcaaacacctcctattgtgttggcctttgacagtgtcacgtgtgcttgttttattgccttgactaactttggaggaatggagaggatatggggtttggtggggtatgggcatgcttgcaagggtatgccactctgcctctgtggtgtcactcacactccagggctgtctgtgggatcagctgaaatcatatactttctcggcttcttctgccctgtgcttcctcattgccttgttggtattacctgagactcctcccttataaatcacatgtaaaagaatccccatctcaggctcagctccatgagaatctaacttagagcatttccccctagaatataagctcctgatggcaggattgtactttgtttcattctccattgaatttctagttatcgaatgaatgaatgtgtaagtcactagaaactatggataaatataaggaaataagtcatagacttggctctatgttctctcatcttatctgaaagcactattttccataaaccttaaaaaaatgtagacaatctcatatattatttttcactgttttttcttaatagaggacaatgaagagatactaccgttttatttaatgtcctttgaaatccaagtgaaatttaattgtggaattgattcttaaggcaatttttcttttccttgatcagttcttcatatacttattattattttttttttctgaagagcagcatctgagataattgctttttttgagtaaaacttgcaatgagtttcatgtaaattataaaagttagcctggcagtggaagcaaagaacatgtccacattagaaaccgtttaaattcaaacctaattcctttaaagaacgctgtaccagacaatgtggcctttcctttgaaaggcctgcttcaggcacaagggaaatgggggcgtctccatttgttgttgaacagtgcccttagctgagcagtgggagagaaatgatgaggagcgtgcagaaagcgattgctttaagcgcattggcttttcctttcatatctgcaatgtgatcctattattttcaagcaaatggggtcctaagtgtgcctggctggaggtttgctattttcctctattctttcctttaaatcttttttgtcaaccatgttctccacaactagcagagcagctgtctgggtagttataatcccattaaaaaggcttctattttgtcaataataaatttatagagaaattagtcacctggggtcgttggatgattcttctctttatacatattgtaccccagaaaagcagaccatctccttcttgttatatgaggcctgctgcctctgtcacggtgccatattggcagaaactgattagcaattaacatggaacatgccttcctctgtttgcaaagcccccttaatctttcccactgatcatattccgctctagcttttctgataaagctgatattgtagatgagtctgggtgtacgcggcttatagtattaggtaaaaatatgacaggcattaaatgaccatcctggtgggaaaggtggggaatttaaccacaaagattttctaaacctgttcaactgcatttgagcagtatcctaaaattagtagtgcatcttcctccacagactccattcttttttctaaagaggctttacattcttaacatttgagttcaggtctaattatatacttctataataaaaggaagaagaaagacaaaacctggatttgagcagttaggggaatgacttgcagtataagactatgtttgattattaaactagccactattagtgggttgaggtttagtttttggaaactcatcatgttttgaaaaccataaaaactagcacaccttttagcagactttataatgaaagagggtgacgtcaaagacaatccacgtggtatggcataccatttgtactaatttctctttcttattttccaaatcatgactgatttttgagacaccaacaagactctcttcaaggctgatttcttactgttactttctcactagtttcagagttctggaaatatctagatagacaaagagacaagtcatctgtaggctagttggtgtttgctctcagaacattggtgggaagttgcaaacagaggcacaaagcaaggcatcaccccacgtttcatctgttgtcacccaccttcaatactaagcaagcagctttcaggagagccctagccaaatttgcagagcagatcatcagatttaaataatggcatgaaaagctatgagtggagaaataacagcaatatttatataacatagctgaaatttcctcagctgtttggaattacttagacatcacatttaaagtgaaattcagagaagcaagaatccttggccaggtctctagttctgggagtcagatgttctaaaagcttcattcgatcctgctcaccagctgttcctctcttcaccaagaaaaggttctttactgcttttctctgtattgtgccttcctccaccccatatcatgtggtgtttttcccattcagaaaagatggacctttccaccttgagtgtataggggtttgcttttgagatggagaatatggggccagggcatagagcttttgagaactcaaattgcataggtttttaaaaaaatgcttgcttttcatgcttgcatgaattctacattcagatgatattcattagaaatacaacttgtgatgtctcagtggcccacacatgctcatgttgaaggaccccagaattcaagttgccaatttcctacattgctggtaaatggccatatgacagaacatcatatcttgaccctaaaagcttcaggtttcattctctttgtgatctaaggaaaattctctgagagtggaatattctagatctatgcagtccagtggaaatttctgcaacgatggaaatgttctctgccctgtcctatttggtattcattagctatcgcacacttaaaatgtggccaatgtgatgagaaattgaacctttaattctgtacattttaatgaatttaaatttaaatatccttatgtggctagtggccactgtattggacaaccctattgaagtagagaacttttctagtagctaggattggcaaagcctgtataagccacacattttgaggcacaatgtaatgtagtggttgagagagctgacctggaacccagactagatgagttcaaattccacctctgctacttttgaactgtgaagttgcagaggctattaatctctctgtgccttagtttcctcattggtaaattgagagataatgtctgtctcacagtatttgtgtaataatttattgactaattcacataaaacgcttagaataggccaggcgcggtggctcacgcctgtaatcccagcactttgggaggccgaggtgggtggatcacctgaggtcgggagttcgagaccagcctgaccaatgtggagaaaccccatctctactaaaaatacaaaattagctgaacgtggtggcacatgcctgtaatcccagctacttgggaggctgaggcaggagaactgcttgaacatgggaggcggctgttgcagtgagccgagattgtgccattgccctccagcctgggcaacaagagtgaaactctgtcgggaaaaaaaaaaaaggttagaatagtacctgacacagaaaaccagacttaaaagtagacaatgcaatggcataggagttctgagactgtgctcctggaaccaatgaaataaattgaaaggattaagtaaaacattcatccacggcacatagatggtgaagcctgagggttttcctccccatttcctctattttcatcactatttgttagttaactcatatatttgtttaacaaataagactgctctctgctagtcttgtcctagaggctagagatgtaacagtgaacagaacatcatatctgtctgcaaggaggttatggttgggtgagggagagtatgggagactaaatgcaaaaatgactgcacttcttcacccctctctgtagcatgcctctttgtaatgtgacttatcttagctcctctcaagaggagtccatttcctcactcttaaatctgggttaggcttgtgccttgatttgacaatagagtgcagcaaaagtgaccttgtgccagttattcacctatgcttcaaaatatcttgtatgaatctctcccttgccccttttctttctctcagaaccttgcccagatgctgtgtgaacaagttcaagctagtctgctggaggatgagaggtcacaggcacgtggcccagttaacgccatcctagaccagctagtgccacccagatgaccacagatgcatgagcaaacacagctgggcacagctcatggactcatgtttgaagtcgctaagttttggggtgtggtggatttgtatgcagcattcactcactgatatagacacagtccgtccatgtggcagccatcaatcatcacatggcgtgatggccactgtcatagagataaagacagggcatctgaggagccttcctaaaggaagacattgctaagctgaggtctgaaagatgaagataaaggaaggagatgtttcagacagagagaacagcatgaaagacttagaacatgaagagcagagttcattttttttctctgcagaagcatgtgaatgtaaatgtttctttgctccaggagcttcttgtgtagctgtgatgtcaagatccatacacaaatagagaagtctatgattacacaaggtgaactatattaagtgctgaatttattcagaccctagtgcaggagatgagaagagagtagagagagaaatcaatatgaactgaaataagcagcctggaaggttcttggaagataagcgaattgtgctaggacttaaggaatgggtaagacttggctgggagtgcagggaagagtaaaatattcctgcaactacctggggcactttgtgagagtgcctacttggtcatccttgcccattgtgcacctactgtgcactaaacccagtgtgaggaaccacaggagatgaaaaagaagcaggaaacactaccctagtcttgcaaaaatgagtgttatacttgcctttggggtggcaagctcctcttaagttacatcttggcatttgcacaacacgagttcagcctatcattcatttccatctacattgttggggttatcgctttgtggcgggatgcagggagaaccataaaattgtagatcaacaagtacagttttaggtgttcttgctaacagttaaaggcttggttgccagttttttcagaagatactgtctcatgaccacttttcaaagagactagggagttccatttctgagccccctgaagtgtggatttcacgctgctctgaagatctgagccccaggacattggcgcctgttgagagttttatcttttctccttaaggtttctattgggccttcttgggatttagaggcttatgtggtgttttcttagccagaagtctttgcaaaacttgattatcggaaataaaccagagccacccccaacttcttgaaaacagtgtttaagaaaaccttaatttggagtgagggacagcccagacggctctggcattagctcagagctggcaatcctgcatcgaagcagaaagttgcctatttgtaagagatatatttgttgaatcacaaaagaaagctgctattataagtaaacccaggcatctagggacttgtgtggagataattcatgctgcccccttttccagtttgcaaatttcttttggagggcagagtagagggtgggcgtggagtgtcccttttaaaggcccacatgaatccccatagctagtagccatctctagtcctgtctgctcttatctaggctttccttatgggttctcaaaaggcatttgaaaataaacaagcgagcaagcttcccaagacatcctagcattccactctgacacttgctgagacaacaaaccgaagctggtccttctccattacttctcatggtcttcattctgggattcttttccttgttggttcaggagtgagattctacatgttactgtcaaatgatctagttggagcttatgccttttaccacaattttagaaagctatagttttggatggaaataaatacttttaatattgtctatggctcctgaacccaaagttctttactactttcaaatgtatttaagtataggaggtagtttgtgggctaaaaaagaaaggtcctgtggttaatgttaatggatttcttctcagtttataataaccatatgaaaaaattacatttcatatcagataaggaaaaatttctataatgtataaaaagtacctacatatcaataaaagtagactgaaaacctagtagaaaaaaatggacaaagtatatgatcagatagtttactaaaaagcagatacaagtgaatcttgtatttgtaaaaagccactcaacctcatccattataataaatatgtgtattaaaattataatagttttcatttctcagattggcaaacgcctgaatgtttaatgatatatttggttgaaaaaataagaaactgaaactgtcatacattattggtggccctgtaaattactacaaataatttggaggacaatttggtaataactactaaaattgcaaatgtcccttgacctagaattacacttctaggaatttatcctgtagaaatatccatacatggatgaaggaatgaatgcacaaagttattcaatgtggtgctgtttgtaactgaaaaacgttataaacaactttaataggggactggataaatatattatggttgatggtcaaaaagagtgaggcagatctttattgctatagaataatatccaatgtatgttattatgaaaaaatgaaggatgaagaacaatttgtgttatgagctatcattagtgtaaaaaatgaaaaaatgtttttgtttgtatgtgcataaagtatctttagataaacaaagaaaatgaaagtagcatttttttttttcctcccagaagatgggaactgagtggttggaagacaaaggtgggagggagacttatattttactgtgtatccttttgtacctgtaggatttcgtactgtgtatatgaatgcattacccatttaaaaattgaaacctaaataagaattccaaggtgaaggtttctttttgactttcttctatctgaaaatttgtttttccttaagcccatgcgatagactatttgcttcacaaggcctaccattgtcttttcttttctaccccctttgtctaatttagtgcctggaagagaatatttgtcaccaaaaaatatatgttacaaatataaatgaagggatgggatgcatgagatgacttcacaatgagccttgcaaatctgaagtatccacagtaaggctgttttgtgctcaccatgattttcaggagaagatgttcatgttgaaattggtcactttccctcttaaacaaaaaactgaagaaaagaaacggacttaagaatgtggtgttaaaacccatatgactgtgtggatggagccatttccctagccacatcatggccattggtcactgaggaattccttctgaggggatggagaatgaggagagaaatctgaaggcatgaccatgatctgtagtctactggtagaagtttaataattggcttctagaaaatatcaactctgatttgtagtgttcaccaatttccatgttgttaatactcccaccatagctgattttgggctactgtgtgaagtgtgagtgacataattgaatgtgaagttgggaagatattataaccattggctcttgtgacaggaggagccaggtccagcacttaacgtgataaccaggcaaggatttcccttccatagcaaagagcaggaattttgccatgtaaacagagaagagttggagtcttataaattttatgtaagttgtctaagccagtgctcaaagtgtggtccacgcaaactctgcggctgcagacccaaacctgctaaatcagaaactcaggagagaaggttcagtgatctggattttagaaagccatccagatgattctgatgggtgttaaaatttgaggaccactactctaagtgttagtttcctctggaaatgggaaggagtatttaaaaatacaggcctgtagtaaggaatgaacagaataatgattgtatgttcttggcacagggaatgttaactatgacattgaaggtgatattttttatagctcagccagccatttaagaggcactaaataagtttgaagtatgctcaattccttttctcatgtcaagggaggtaagctatatgtctataagacacatcataactttctgcatagttggaccatgtgtaattgtcttcattcttgtagcatcacttgggggaggtgaataccagcctatctcccagtagcatgctcaggcagaactagatgcctcagataaaagccaatgaggtattctcccctcaacacccagctccctggcaacccccagtcttggcctaactagttgaaccaacttattttacatgcactgaaaaccagcctccatgaaaaagtggtggtgaggagtgggagatgaaaggaacatatttggagacctaggacttgaatctcaagagagctttggagtggggtagcaacacttgtggtttaggagactattagctccattttcagagcacctactacctagcagacattgcagcacgacttttcaccatagatgttatcaccattttgcagataaagaaacagatggaggactcaagtaatgcgttgaaggtcagagtagacagaggctttctggatatagaagggcacagagccagtcccttagctaccatttgtcctcttttccctaatgtatccttttcccctttatgctgtagttcttgggagtacaaggaccactaactcctgtggcagaatttttttttggcattaggcatatttcagaaactcttataccagaatggtccatggcagtcttccctgaaggctcaaaaatagaatttcaagagtaagtgcgatgcagtggtgagagcccaagggtcacacagacctgtgatcgaattctagctctgccacatattaattctttgactttgagtatgtgattcattctttccaagtgtcttagggttgagttcctcagaagcagagcctgagatagggacttttgtgtaaatgatttattaaggggatgctctcagaaaacatttgcaccagaatgagggaagcaggaggggcaggagaggatgctgagcaagtgtagaaaagcttggctggaatctagcttcagcctgatcctgtggggagacttggagggtaaattgtaccacggaatttgtcccaaggggttggtcaacttttgggcccctgtgtcagtcaatttttgtctaggggacaacacaggacatgcaatcttcttatgaggtgtttctgtcataagagagcaattttcagggaagaggtgatgctgattcagtgctaatgctctgagcattagcaaccattattcacagtgttcggatttaaacacaatctagatgaggctacatagcttttactagagttagctctcagctttttatttataaaaatgaagatactggtgactcaaaggaatattgtaaagattaaatgatataacatgtttagaggattaaacacagtgccaatcacagagtgagcccttaatcgatgttaacttctttctcttccagtcttgtctaaagagagtaacatcatctctctggttgagatgaagaatagctcctcaaagaaatcagcctatttccccctcacagatgaggagaagagaataattctgggagcgttactcagttattcattacaaaatatttatttgtcacttattgtgtgttggtcacagctctaggtgttggggatactgctgtgaacaagatagacaaaaatccctgcccttatgtgactaacattccaatatagaagaatagacaatcagcaaagaagtaaaactggcaaatattaggtagtaataaatactataaaaatacatgctgggaggatgggatccagaaggactggagagctacactgagattggtggtcaggaaagtcctctctgaaataacactgacttgaagatcaagaatgagttggtcatttggagttatggggaaagactgtttcaggcagagggaacagctaatgcaaatgtcctaaggcagaagaaagtaggaaaattcaaagtgcagaggaaaggctagtgtgctagattatagtgaccaaagagaacatgataggaaatgagtccagaggataaggttggaaggtaggaacagactacatccttcagagccattccttagaaagagttataagaaattctgatttcattataagtctcaaaggaagctattggtgagcttatgtaggggaatgaaataaacttacatgtgttttaaaagatcactccaacgctatatgaagaatcaattgtagaagaacagaaatggaagcagagatgccaatcaggagatcatggtgaaaataatgttagcttggagtgaagggtggaacagagtaaatagatgtgtatggatccgggaaatgttttgatggcacattcaggagggcatatgaacagattggatgttggccgtgaaaaatcaaggatgagtcctaggtttgtggctctggggtctggcagaaggtttagctgttgactgagttgggaaagaccaagggagaatcaaggatcttgtgtatcacagacagaaggaaacacatgaggggaaaggtatagtgagggaaaagaaggaagaggaacaagtcacaaggtatggaataaaatgcagaacatgcaaaattagaacaaaatggaagagagaaaagcagaataaacagagttttaatactatgggtggaaagtttcatgcaaaatattatgagatgcatcggagtttgaaaggcctattcaaagcagctcggtttggtgatcagcattttcggagaatggcaaatacaaatttatcctgccagttcctctaagaggaagtgtctggggatatttaggatctggaatcttggaaggggtgagggttcatttattttagaattataagtctttttcaaatttaatcatcaaagccataagtaacagggatgaacttctttttaaataggaatattttcttagtggtgtactttgaaaatctcaatagatgggcagaaaaatgcaacatctcagctttttccattggccccacttccactgggggacaagagacagaagctagcattctctttccatcatgttcaatagtaaaaaatcatgaagcaaatgtagcatttcttcttcaaagatttaaaattaagaaaaatattttggggttggaaacttgggagcgatgtgctgtgttgatctgtctgtccaagaccaaaaattccaaagagcttggacgaaaacacaacagaaaccctcctgtagctttgttcttggttaacaattcttccttcaagacggacgtattcttcccaatgaggcctccttctatgttaattttttaagcacatgaatgttactccagtggttaaggtagggggatcaacataggagtggccaaggtgttgagattttttaaatggtcatgctatgtttctgaaagcagctgccaaggagccaaaggaagaactggagattcctttagaaacatttagaatcatttaggggacatctagttggagttggatcctctaatcaggaatctctctttcttttattcctccagtggcaaaaggataagaccttggtgcagttgaagggagataatcatggatcctagctgagagttacttctagtcacctatgaacttgtctggctgggcattactgtaatgaaatcagccagtatctagcatcagaaaattttgtccaatttcaatacacttgggatgactagcgggaaaagtctcgtttgttgatatccactatgctccaagtcctgcactgtacatgttaaacatattattatcattattattattattattattttgagacagagtcttgctctgtcacccaggctggagtgcagtggcatgatctcggctcactgcaacctctgtctcctgggttcaagagattctcctgcctcagcctcctgagtagctgggattacaagcacctgccaccacgcctggctaatttttgtatttttagtgaaaccctggctctactaaataacatgtttggccacgctgctctcgaactcctgacctcaagtgatccagccaccttggcctcccaaattgccgagattacaggcgtgagccaccgcacctggccaaacatatgattgcatttattcctcacctcaatgcctgagtattcgtatttctattttaattctacatgaatgcagctctgcctagagggatctgaggtatgactacatcaggcagaaagagttgggtgatgtctcttcctttatgttaccaaatgtattgacaaatttttatggaattcaagaaacctgtgcagaaggaaaataacttgaatggaatggatctggcagggggaagggttacaacagaagccaagcttcgggaaagggctctggagaccccagaatattaattccaaaagaaggaaatggtgtgatgaggcagattctgcaatagggtctgcattgttgttggttctgggtttagcactgaggctggcacaagacaccctgacggcatatataagcccatgggagaaaaagggcaatattagcaagctagaagaggggactcacacattcaaattgacactgtccagtattacaatggacactgtccattttcctcattctgtgatgaggaaaatgttctttatctgtgctgtccaatagagtattcatgggacacatagggctattgagcatttgaaatgaggctaataggattgaggaactgaattttaattttgtttaaatttaaataaatttaaatttaaactgaaatagccccataggtctagtgcctatcacagctaaaagcttcagtacccacagtgctgtgggatcctcacagtcaagcacagctcagtaaagcagacttcagagatatggaaggcaagggaggtaatgtgaaacacagtgtggagggagagacgtcagactacagcccagatcagttcagagcttcacaagaattaccttatggactggactacttgtgtaagcagagggaggtttggagctggcaaaatatgtgcattggtgacctcatttgtacccacatggtagtgagctttgggttactttcataagagataactaggctcatcacttggcagagggcttaaaatctactctagtccttagcatactgtatgtgttcaataaaaatttgttttggatgaataagtggataaatgggagataaaagtgctcatctagatcattgtatccattagctattgctgcagtaatgctgaataaaaaacaccccaaaactcggtgacttcaaggaagaataattgatgcttgctcttaggtcaggagagtagctggcatggtccatgttgtgtaagatcatttcgaggttcaggctaaaggaacagcagctacacaagagaagctctgttgatgcagatgacaaaagctcaagaggcaaacagaaacttatgtgatatggtgggtcctcagaaacatgtcatcacttctgtccacattccattggccaaagcagatctcttcactgagcccaaagtgaagggttggggaagtacacgatgcccacagtgcaaggggcagaactatgaagtcacatggtaaaaagcagtgtccagggaggggagaggaattgggacccaaattcactctgccacagtcatagctggagtatggagccagggtcacacctggagttcacattcgattttgtcgagttccagagtttatgttccttcctctgtcccaaacacttcatgtattatcaaagacagttttaccattcatgtgattcctagtctccagactgaagttatgtttccaacctttaaaaaatctgatattcttcttttaaacattttgttatttatctcattgaatgattgtcatttttgtggtactggactgcaatcaatccacatgatttggctctaccacagggctggaggtgtagtggtgtggaggttcaaagaatctgttagtctgcacatatttttgccttaatcatggaccatctcagttactaagggcctgggattctgctgccaatggctgaagcacaaaagggtggaactttcacaaaccctgtgccctgggttaggtttttaactttgactgaggttccttgctgctatgagaacctaccattgctttatttatttatttgattggttcactgaaaaaattatttacaatacaattctctttttggtatgcaattctatgaattttgataagtgtatgcagtcatacaactacgaaaacaatcaagatatagcacatagccatcacccataaaatcccctgtgctgtccatttggagtcaactctttccccaacctcagccttttctagaatgtcatataaatgcatcctacaatatcgccttttgaatctggcttcttccagttagcataatgcatttgaaagtcatccatgctggattcatccatgttgttggatgacaacaacaaccactacatatgtcagtagttcattcctttctatttctgagttgtattccattatatggatataccacactttgtttatccattctgaggctgagaggcatttgtttgtttactgtttttgatagttataaaagggccactataaatgttggcatataggtttttgtgtgaatgtcagttttcatctctcttagatcaatagttagaataaatacctaggaagatttctgggttgtatggtaatatatgtttacctttttaagaaacagccaaattgttttcaaggtatacgtgtgtaaatgtggctttttatttctctattttcctctctgcaatttactttcctatatggatttgtgatccagacaccgtttttttttttctttccctggtagtttaaaggaggctattgtctggattaaatctactttggaagaaagtacatcatattatagttttctgtatgatacaatagatgtgagtacaggagttcaagtgcagggaattgcaatatcaatttgcctttagtgcactgagcatccagggacattttttggccatcagttacctcaataccaacataaacgaattgatctaggcaataagtatagtttctatagaggcggtttcttagccttagcttcttgctgatatactaagccatcaccctactgtgatttctgatattcattaagctgaattcctgatgttggcctttaccaatgtaaatgtgtgctggcctagctctcaactgcccacacctgcctcttttagtttgagactcttcttctgccatcataggccactctgctcatgtacatggtagataggagtgccatgggattatgccccccggagacagctctcaaccactgactgacagaaaaaataaattggattggtgtataagcaccccagctccttcactctctggttccaataactcagaggtgtgtggctctatattggctcccagggctctccagtgaggttaagctccagttgcccacagtagtaacttgtttggtaaacaagctttactggctgcctttccttttgtttgacttcactttcttgctgttgtttctttacttcccagatcacctacttaaacttgtccttgattcttgtctactttttggggaacttaaacttagactgcccttttcttaatttctctcctcagccccctttttggttgcctgaagagaggcctgctgatacccaagtgtactaccttccattaactgagtctagtcacatcgatatctagttttctaaatcttgacatagtctaggtgcccctgccctcctgctgcccatggacatgatgtagcattgttatggtgcaaagaggaaagagtgtggctgcaggtgtgaatttgaaaaagtaacataaatttctccaaacttcagtcattgacatttgtaaaatgaagttagtgggtcctgtaatgaggatggtttagaactttaaattacctacaagtgttcactggatagcatcggccatcatcataagttggttctcttgtttttccactgtctgataactttgaggccaagtcttatttctttcattgctgaccagttttcaagagcatgcatcaaggaataattctgtttttatctatggtttgtgttttttcattgtcctaggaatgtgatgtgatgtatttgtcccatagttcctgtcttggtagattatttcaataaaagaagtaattcctgtcagtggtactgattaggaattaaacaaaaattacagagaatttctcatgtgtttattgaggtttagtgaaagaagaaagcggtgacatgaaaacaaatgttctgtttctgctttgaacttcaagcataataaaagacagaagactcagagtaaaacagaatcttagcattggaaacaacatgaagagtcctctggcaacagtaacagtaatagttgatgtttactgagtactcagaacagaacatgccagacagtgctccaggcatgttccaggtgattcctcaacagcaaacttttgaggcagatcctgttatcatgcccattttaaagataagaaaatgagtccaaagaagttggtgaacttacccaagattacatctcaagtaaatggtgaggtaggagtcagacacagaaagtcagacaccagagcccacattcaacctctgtgtcatgcggcctccccagactgagcagccctgtcatggagaattgatggttttcaagacattttcttccatgttgaatagtcctagttctttatcttgaatgtaaatcagcttctaagtttcttaaactctttgatcttagatccaacttttagagaagattatttttacctttggcttgacagccttctgaggcttactccatcacctctgggttttctctccttcagaataaacaggccctaagtccctgctgcaaatcacttgtgtgatatatgtattcacaatcacaagaaagctgctgttcattcctactgttcattgttagagttagctcttcagccagacactaatttgcattagctttctatcatacctagttattcaaaaggactgaatggaaacagaaattcaatattttacaggaagaaatgatgagctctagaaacaatgagttttgggtaaatatacaatgtcttccccctttattctctttaaaagatcattgactatttcaaggaaaataagcaatgtgttctgggatttactcattatgcatatgataacaattacataaaaatagaaaggaggtaaaaggaagaatacttttgtaagattaatacattagatgtggtacagtattaattcatgatggattgtgacaagttaagaatgcattttataatctttggagtaactattaagagaaataactagagatatcgttaaaaaactgtagagtagattaaaaaatattaaaagatacttcatcaatcccggtgaagtcaggaaagcagaaacaaaggaacaaaggaaattgaaacaaatagaaaacaaataggaagcatgtggagctaaactgaattatagaaataattacactaagcattaatggattaaacactcagattaaaaggcagagattgtcagactgagtgaaagaggaaagtctacctgtgttttgtttataaaaaatacattttcaatgtaaagacacaagttaaaagtaatatgaagagaaaaaaagatgcatgtggaagggactgaactacataaattgagaacccctgcattacttaatgtaggaagtatagggcacctatatagatatcttaacagaaggaggcaacatacaaagaagattccttggaacaaggatgtgccaagcactgaaggatgctgaaaacatctctctagagatgcagaaagcttagcaaacaatcaaaataatgtcttctctttactgctttgtagataattgccaattaggattcacttttaatgaaacaaaagtaattttctgctacctcctctaggatagctcttcagcctgactcagcatcttagctatgagcagtagcaatcacgtgaattggataccaatttcctttaccagttggggtttggtgatgaacttagctggctgacaccttttatcctggtccagtatgtccacttttcctcctggccctaggatagtagctgttgccaaagcaaacaatgacagaatataagaaagaggaatgagctgctgacatgtttattgctccaattttgccagtagactgaagggtgtaaaaatgaaagagatgctgttgtggctttgttcatcatgcttttctctgaggctgttatttggtaaaaagtaaggtttccaagtggaacgttaatttctccacatgcagcacatatgcaacgtgtgcccggctcttcacagactgagaaaaccaccaggcttctgtgaaataaagtaagcctggaatattccctttctccttttgatctcctgctaagactcctgcttaacatccttctgaaaggcttaggtgaggcaattgcagagatgtaattccattgacaaaattcatggtttcagtcctgcatgttaaatgagtttcaaataaactggagattgtcaataactatgatacagagctagactgggctggggagaaactttttgtggtgggtggttatttttctgggagtgactttaattaacctctcttctttaagcatcctcattcaaaaggccccttggcactcaagaatgaaggtaacaatttttattgctcagcattgttaatttggttgatattggggcaattccaaagaaaccattaaagctatcagagaaaatgaaggggaacacattcgagtaagattttggaacatttttggcttttggagtggcctgcagttttgacaaaaaggaaaaaaaaaggaaaaaagaaaaggatgaatttattatctacaaatagtggaaaatattataaatggcagtaaatgaagtaaatgggagtttccactgtaatgtatgattctttgagccagccacccagaaagagcacagcttggtttgctgtgtggggagtatgagctgaaatgcaagagactcttcttgggctccaagcaatatttgggaataaggcattgcttctgctgctgtggctcttctggtttattgcccatctgggctatgagtgtctttcagcctgtcaaattgaacccgaatggagctctcagctctgtgacttcgatctgaccttagggtgttgctttcttgcctgactcaggctccaggggaaaagaaaataagagaataacctctccttttgtgaggaaatggtttttcttgcttttggatggctctcctgctctggctgcctttccaggcatgcagaacaaaagccatggctgtgtctccttgtcagtgggatgcaatcactaagcatgtctgctaaggctcaggccatgctgctcttctccagaccccaccctcctatcctgggaattgaacccgtgagtttacagctttcctacacaggaccagaaggccacattcatcactgccaccaacaccaccgtttctctctcctgctatacgggatccacgaaggggttcccccacttttactgacttcttgatgccaccttcttcaaatgaatggttacccactggcccggagtggaagcaaagtccacctggtgggttctcttctgtccttctggctaacaaaacaggtcatccacagcgtcgtatcttctctatctttcctgaacgaactttagcaatttttgagaaattgtcaaaatttagaggtaattgtaatatcttagttcctgatgtttgctatgaattccagaaaaggggataactgtgtctatatctgtaaaaattttaaaagaaacttatctctagggtttcatttttattttaaaattctcaccaccaactatcttgtactgagctaaaaacagtcctgaaatttgatctgtgaattcttgcccgtctgtagaaattgtggggttctggtgccaaatctaattctacaagaattattgagaacttaattccaaattctgaaagaaacacaagtcacaggttcagattttaatgagcataaactctacccgaaaatacagaacaaacacatgtggaacacttggtatgtatttcttcctattcgatatgtttgcatgcacatgtgcatgcatatacatacccatacatgtacacatgcacatacatacatatgcatacctaggcacatatgcacacatgcacacacatatatgcatatgtacatacccatacatatatatacacatacacgccttcctacatacatacatatatacccactcacagatactcttacatacatatacctatgtatgtaagcgaatatacctgtggctatgtagtatatgaatgtgtatatatgtgtgtgagagggtatatgtgtatgagagtatatatgtgagtgtgtctgttagtgggtgtttgtactcacagacacactcatatacatactcatacacatacacccccttcacacacatacatatgcattcatatacatatacatactcatatatacaaattcttatatacacacatacacacactccatgaacatatacatacacacaaatatacaatcctatagacatatacttaaagatacatatacatcttaaaattctgatcaattaattaaatagctagagccctttagactcatataaattaatagtgtggatccttattgtttaaattattttgatgtggatgcttcccctgttttgccattaagaatgggactaatttttgtttggaaatatatatttttaccatactgaggaacttggtgtctgtttttatgaaaatttttttttgttctcagaaatctgaaaaatctcaaaagtacaatgaataatgatgcatgttcatacactcaccaatcagaattgaagattgttaaaattttcaccaattgaaataaaagaagtaaaggattacggcgaatgataaagtcctccactggcagtattgttcttgctccaaacccagaggtaaatgtgaaaggaatatgtatctttttcactccattttaatatatttacatacttatgtatgtgttgatgaataatacacaatgtttgtttttgtgttttgaaaatagacataaatgttaaggttgggtgcagtggctcacgcctgtaatcccgggactttgggaggccgaggtgggtggttcacctgtcaggagttcaagagcagcctggccaacatggagaaaccctgtctctactaaaatacaaaaaaattagctgggcatggtggcacacgcctgtggtcccagttactcaggaagctgaggcaagagaatcacctgaacctgggaggcggagtttgcagtgagccaagattgtgccattgctctccagcctgggaaacagagtgagactgtctcaacaacaacaacaacaaaaatgtttaaggtgtgtgctatttgcttttttgcttttttttcactcaacattttgtgtggagttctaattacatgactgaatagagagagctacataattttaacagttgtatgaaatgaaaatacaaatgtttattcattctcctattaatataatttatttttttctattttgaaagagttttgccatggaaattgttgtatatgtcggtttataaactgtacaagaatttctctaggatattctacgctggagtagaattccttggtcatatggtatgtaggttatccgtgttcctagatactaccaaatatttattcaaagtgatttgaccattttgaactcccaccaggagtttacgaaagttccgtttccatatatttttgctatttttaaaaatagtttcagatgttttaatgttattttatataagatgtgagatgatattgtactgttgttcaatgtacaggtcctaaggagtgtttttgaactggaaataaatgtttctattcaatgccttttctgaatattgagttttttattcacatgcattgttaattatactgaatcctcattattcaatcatcttacgatttccaaaggttattcccctgtagtattcatttactgtactgacaaatttcatttattgatatttaatttatgagcttttcatgtcaacatatataagtaaggttgttctataattttttcttgggctattttttttctcaggttttggtgaagttttatgttgccttcataaaaagttaagaaatatcctttctttagactctggaacatgttatatagcaaaggaaaaatctcttccttgaagatttgaaaaattcacccttgaaaccaactggctttggtgctttttggaattttaggtagggtaggataagaggggcttagggagaacagggaaatagctctttataaatgttcataatctcttctttggttattcatattaggttctcttaaataatttcaagtttcctattttttcccctagaaagataatttacccaggtttcaaatttattcacttatagtgaaagtcagatatattgatcatccagaatatataaaggacttttacaactcaataataaaaggacaacccaattaaaaatggacaaaaatctaaatagacagttctccaaagaaggtatacaaatggtccataagcatatggaaagatgctcaacatcattagtcattaggaaaatgcaaatcaaaaccacaaggaaataccacttcacatctactgggatggctgtaataaaacagacaatactgactgttagctaagatgtggagaagtgggaaccctcatacattgctggtgggaatgtaaaatggtacagctgctttggaaaacagtttggcagctcctcagaaagttaaaaaattgagttattgtgcaagtaagcaattccactcctaggtgtataccacagagaaatgaaaacacatgttcacacaaaaacttgtacataaatgtttatagtgggattattcataacagctaaaaaatgaaacaacccaaatatccactaccaaatgaatggatataccaaatatggtatatccgtatgatggaaaattattcagccgtaaaaatgaatgaaatactgattcatgctactacatgagtgaatcgtgaaagtcttatgctatgtgaaagaagccagacaaaaaagacctcatattatatgacttaaatgtctagaataggcaaatccatagagacaaggagtagattaatggttgccaggaattgagggaggaggaattaggagtgactgctaatatataaagcttctttttggcttcataaaaatattctgggattggaaaatggtgatgtttgtatgactctacaaatatactatacataattgaattgtacgctttaaaatggtaactttcatgttgtataagttatatcttaatagaaaatatattggtaacattcagggcataaaatcttagagttgggattaaatggtcatcaatctcaaactcaaattccagtggtcaatagtctttggttgaggtctcttccccaaactggagttcaaaaccatacaaaagagatgattcaattttgacgcgtttttatggctagaaaaatttccccctttttgacttgcaatcttccttccttaaacaatctcccacccttattcttgtgtttatgtgatgagcaaaacagagtaagtctatcattctcttctgtatcattcccttctatgtctctctttccaaaaaagttaatgtgaggatagtgacattgtcagaagttgtatcgtttcctctttttttggtgttatttagtttgtctaaaaccactgcaaatatcatcacacaatgttagctccccgtgtccctactttcctcttgccccccagcttcgttgattgagggccctgctccatgctcttttacaaagttgtgcttagctggatccattcctcagtttaaggcacaaggaggcagaaatagcagagccaacctaactctccattaatgcagaatctctgccctccaaatacaccagttttccttaagatcttccaatcttgcagtagtagcgaagagtagaagagaagtccttgtctcaagaagagactaggataaatagaaacacaggtaagagagagcttaaaaaatatacacgtttaatgcagaagtgaatgaacgtggctagtgtcagagaagagaataatgcctatttcttctcttagtcccaaatatgctccttggataaactcatcagaacactgagcagatggaccacaatcttacctggtgttccagaaattaggatttgatccctcctttccctgatctgtggttgacagaatggcgtgatagttacaaatgaagactttgtaactgatggcctgggtttgaatcccagagccacatctcttttaggtcatctgtgaaatgggaatgataatgataacaactgtatagggttgctatgaagactgaagctagcacacacacacacatatacacacaccatatacatgtatacatacagagagagagtgtgagaagaaaggagtatttaaagtagctcctggtacatcgtatgtgctgtataaattgatgtcaatggctattcccactgctattattgctctgggatggtgtttaggccgctagactttctggaacaagcctgacttttttcagcctattctttagttgtacttgttaactggtcattgctctagtttaattggcactcagggaggctgtccactccctacttagtctgtccatgattcttgctgacctagatttgttgtctctgtaattccccttccagcttttacagcaaagaggccacgttgtaaagctgagtagggtgtggttccaggaagctaactcccccacccgcctccaaatgtccttaattcatagggaaggccctgattgctttggttatctccagacccccctgtatagaggggctgctggagcctcagttttcatgtcactgctctgtggctttgtaggcgggactttgactttcttcctcaaggccagctgttctagggagcacactggaatgtctcttttctgcttaactgtgctatgcgtgctttgtcttctcagcaatgccagagatgagtcaccccttcacttgtttgctcattcgttcttttagaaagtctttattgaggtcttaccacacgctgcatttggctaagtgtagacagatggacagatactgcccttgcccttatggagtgcataagctacatgctactgaaggtggtactgactttgaagcatcaagaataactctcagattattttccaatgtaatctgatgaatgaaggcatttaaggaattctagaggaggaagaggttgggggtgagatgggagacaacagataatgtaattttgcatatgataatttgcatatgttagtttgaggtacttgtgaataacctaaggggggatgtggccatatggttccagagcagtgctgtccagtggaatatgatgtgagccatgtatggagttctaagtgttctagtagccacatcaagacaaataaaaagaaacaggtgaaattaatgttaatactgttttaatttaactcaatatatccaaaataatatgtcagcatttaatcaatataaaattattaatgaaaactagacattttgatactaaatcatctaaatccaatttatattttacatttacagagcctctcaatttggatgttaagttttcattcgtatgaaaaattgatagttgtaaaagtagatttggattgtttgtaacacaaaggataaatgcttaagggagtagataccccattttacatgatgtgattatttcacgtgatgtgattagttcacatgatgtgattagttcacattgcatgccttatcaaaacatctcatgtaccccataaatttatacacctactatgtacccacaaaaatcaaaatgaaaaattttttaaaagtagatttacatacctaaattgttccaaacattattaaaggtgttccaataattaaattgagtataatttttaaaaaatcaaaataaatgaaaatgaaatacaatttttaaaatgcagttgctcagtcatactagctgcatttctagtgctcaatagccacatgtggctagtggctgctacacacaacagctcttaaggggggatctgggctaaagattctccagactacagacgagatctgacaccaagagagtgaatgaaatcaccctggaagattatgcagaagaagagatgctggatgatctccatgggcctgcccttctacatgttatttctgagcctcagccactgcttaaaattgttcattagcttagatttgggtatatgattgatgaggaagattctagacccggtttgaaaatggggccacagggatggacactgggatgtgggtgtctgcccttaaacatctccctgagtcggagagtatctagatgctgctagggtgtttgctgaaccctcttgattcattggagatctgggttaatttcggccaaaccccatctcatggcctccacaaaagccaagcttgcctgaggctcctttacctcccatctcctctggcctactgggtaggtgtggtctctagatcatttaaagtctgctggtccagaaacccagacacttcactgctttctacaaaacctcccctcactccaggcattgttgaatttagccaccttatagaagaatgggagtaagcaacacaattacagctcttcaagatgcctctgtcttccctctgccttctaacttccctctcctatttctgtttgcactgctctttttctcccccttcaatgacaaatacattgcctggtcttcccataatggaaggttaggcttgttcttgatgcctttccactaatcctaaatgtcttatccgaccttttcacccaaaaaaatacaaaagcctccttaagaaaaatttaggtcaataaaattatcccctctcagggcaactgctttctgaactgtgtcttttattcttcgtctcctcctatgatacggttcatgttccccacagtgcctgctcaacagaacgcggtcagtttatatttgcttaacgactgcccctgcttcttacttcccataaactctgcctttcagaggagaattgaactaattgcacctttatccatttcatccaggccacagacaaaaccacagttcatttggtggctgaagcttactgaaaacttcctttcgtcttgatgcagccagctttttggattacatggcaagggtggcctgagcaaagcgatgggaaagagttgttggtggaacagtgagtgcttgtgactgtgggactagagccttgcctccagaatttagcatgctgctgcccaggaaattaagccttcaagtctacagacttgcaatgagtatggtcgagatgggagtattgggtggttccaagaatcactgagaaacaaaaattaatttgggtactttagatgcctactgatggctgagaaagagaataagaatgtttgaagccttaaagggtaaaagtcaaggaaatggcagtggcctctgctataaaccatataggtggagcagaatggcagcttgagttgccaaggaagtcattcattcattcattcattcatctacccatccattcattcattcactcatataccaggcacatctcatgggctagcatctactgaataattaacatgtatcagacagtattccaagcactttgcttgcattaacttatttaatcctccaaatgacccaattaatctgaaggatgggagtcagcaacacaatgacttataagtagttacttaacttgctcaagcttatatagctattaaatagtggagtcagaaattgaacttggaagtctcacttcagagtatttttactttaccactaaattggcaaataagactgaattcttggtctcctggactttacattgtagtaggagagacagccaataaacatgcacatgaacgttaaataaaaaatatgatttcagacagtgaaaaaggatattatcagataatgatattgactaactggaagggcagtgtgtcagagtagctactttagctaggtggtcaagcatggccactcagaaaagatatttaaaccaagatgaaaatgataatgagaagctagaaacatgcagatctagaaggagcatgcttcaggcagaaggaatagctaaaacaagttcttaaggtagatctagtagaattgttaatgccttgcctacatcccaagggccaaggtacacatcccctggcttccctgagtgttggctgctatctgcttacaactgcaattgcgctttcctgcaggagaatgcctgagatgatgtccaccctcaggggtggaccacagccaatgactgaatggaaaaagatgccagtctgttgccttaagcagggccatgggatcatcaggctgaatctggtctctggtggagactgtatctttgattggcgtctttcctttctctgttctatctcccaaactattttgtaggtttgtcctgagagtcctccctgcatgcacaagaatccccatcacaggctctccactgggaaaccccatctgggacaaagggaaagagcttggtgcaatggaaggatagcaaggggaccagcatggctaaagcccagtaagtgaaggggagagtattagggaatcgtggtaaagatgagagaaggagacagcttaaggaaaattatgtgggctgtgtaaaaagcttagattccactcaaaggcagtgggaaaactttggaaggtaatttgggtgtgaaaatactctcaccagctgcagtgtggagagtaggatggaggtaaggcgaggcagagagcccagttggccatcagttgtaacattccaggcaagaaatgatagtatcttgaatttaaaaggtagtggcaaagggggtgagctaggagctgaatgtggggggtattctggaggtagagccgaggcttcctgataaattggatatggcagagttaaggagtctaggtttagtagtcaggcaaatggctaggtttggtgggaccagtacttactccatcttttttttttttttttttcctgttaagaacttaaaacaaatcttttgtagagtcaggatctcctatgttgcccaggctgacctcaaactcctgggctcaagaacttcttctgcctcagcgcccccaaagtgccaggattacaagtgtgagtcactacttacttgatcttaagccctggaagtttttcacatgggttggttcctcttaattccagctttgtcattggcagatgaacctgaaaacggatacagttttcaattaacatgatacaaaatggcagttaagggaaagtaatggcatcattctattgtcttcctctcccctcagctttccctataattttttatacctccgtgtgtttgctcctttttgctccttacatttctttaacagtggtggtgtggctttaattagatactccatttaagctgggagaaggcaatgccatagctccctgctttcttctgggcaggccccgttgtgcacggcttactttcacagcaatggccttgattaagtgaaggccaaggagccacgcagcatcagggaaggcagaactctattaccctactgctgtcaatcccaagaggatgtgagtgggaaagcaagcgtggagtgactgtgggagaatgaatggttaccctccccttctaagaacctcccagaatatggaatagattaggatactcggaagctgtcaatgctgcaggtcatgccgagaggggtggtaagtgtcccaagggcacaggcctccctgatttcagggtgaggcctgaaattagcaggaggccctggatggggagcccaggctgtgggtggaggaagggagctttttttcattctcctttgttcaaaataaggacttttttttcttttcttttcttttctttctttttttttttttttttgttagtgggagggtgggacatgagcatagccaaaaatttattaactcttcttaactttcctaactcagggagggaaatgttagcaccagtgtcttccaagagagcatcattcacagagctccctgggatctgggaacgccatgattaagaaagcagatgcaggcactcatactaagaaaagtgagtctcaatcagagagagatgcttaacagaaccatgaataattggagggacagaatccacataggccttttaattgatggaagtaaagcatttacagtgtgaacaataagtggaaaagaagtcacagtttttcttgatccactgtgcccaagtcagatgccccatcacttcctgcttaatgcaatgccattgtgccttgacttgcaggcaaagtaagtagttaattttctatctctaggtgtgaaagcaatgcttgtttaatttttggtgatgtctctatctgttatcaatgtcttgaacagtgcaattttcaagaggaccaagaggcaaacatacagtgctgagcacagaagtgcagcttggctgctttggatcaggatctggctttgttccctgtctcacactttttctccagccaggtaaaatcgcctgttgtttctacctgcaggcctgctgagcctcagtctgacagtagtgcctttccacagcaagaattatataggaaactccctgaaagttgtgcaagatggacattcattctgtcacattcattttgctttagttaactagaggttaaggagccggtaggccacacttagagggaggtaaggcaggtgactgagggtgtttagcaagtgttggagatgtggtctgcgatttggtagtgcggtcagaagtaagaatatacctttgggaatcatgcagtgaggatgggagccaatgagaatcttcatggaataaaaatgttctctgctcactatactgagccaagagaacaagccaagagaggtatttttggaaataacttccattaagtgatggacaagaataaggaaaagacactttatatgagtaagtgagaaaagttggagggaaaccaacatcacagaaaccaggaagagaggtctcatcttgagaagcaagaatgcttctgggattactaataggatgggtgtcaaacccagacctttgatttggctaaccctagaaaagacaatttcattttgggttgatttttgtgtatggtatgatgtaagagttcagtttcattcttctgcatgtggatatctagttttcccaacattctttagtgaagagattgtccttttcccattgtgtgtttttggcacctttgtagaaaatcaattgactataaatgtggagattcctttctgggctttctattatgtttcattggtcaatgtgaaagatttctacactttgtaatctaatgtgtagaattccaacattctaaaaagttcaaaacactgatgaaagaaattgaagaagatacaaataagtagaaacatattctgtgttcatggattggaagaattaatattgttaaaatgtccatactacctaaagtgatctgcagatttcaatgcaatccctatcaaattctgatgtcatttttcgtagaactagaaaaaaatcctaaaattcatatggaaccacacaaaaccccaaacagccaaggcaatcttgaggaaaaagaacaaacctggaggcatcacactacttgctttcaaactgtatttcaaggctatcaagaaatgagtctcacatttatttgatgccttctacatttagtgctaggtgagacaattttttttttttatggaaggcatagagagagaagaggaagtggacactatggactggtagaaaaaggaaggcaagagagtgaagagtgaatgaggagaggatgtcattggtgtttgtgtgtttgtttttgaatgagaagatttgagcctgtgttgaggaactggacaagtagtcagtggaaggagaaaatagagaccctaatcatcaaagggaagcccctgcatggtagaaggcaggtgaaggggttaacctgtccatgtgtcagggaatgtttcttccaagatgggcgggaaggaagaaagtttgggtgatgatccaaagaaaacttaaggagtttgggaggaaacttgtgggagttctcatcagatgttctcaattttcccaaggaagtaggtggagaggtcatctttgagagtaaataggcaggggaggaaatagagctggaggagaaggctggctgctgtggtgaattccaagacaaggagtaagtatactgtggatgataaaaagaaagggttacagccaggcacagagcctggctaccaaagtccaccttgtgtgtttactctgccccagccccctttgactctgatgctgacaaggccagaagagcctttcaatgtgcagagatttattgaaaagggtagatagttgaaagataaaactctgaattgcttttaaatagccagagaagactttactgaggaggagggagtttagagttctgagaacacagaaaatttgagtattactccaggataagatagatctctttggaaacacatgccttacttatttgggggaattgagagaagcaatgattattcagtggattacccagattcctctttttatttcactgtgccactgccagaatttgatttgtgacccagcgtggctatgtttcatcttacctctgataaatgatggattggggattttttaggttatgtgtgtttttcaactatttggcattatgactgattgatattttcatagcagtaagtttatgtttaatgtcatcttcaagccagggatgaaagttttatttgaagtcttacttttcaatacattcttattcatcatcctgaccttcaacttgtagagatttccttatttttccagttttggggaagaaatgtcccagtctagaaatccaactgacctatcttcctccaattacacattgaaaacagtggtttccatagaggtttgaaagtgggtctataactctcagtttatcaccttcaatctcctgaagagaaggctcaaggtaaagtatataaaaataaccaatgatgtttagtttgcggataactgagttgaaacaattagtatcagctacataatttatttgcagggcccagtgcaaaataaaaatgttggaccttgttgaaaaattattacaatttcaagacagtgacagcagagcattaaaccaatcatgggacccctccaagcacggagctctgtgtggcagtttgagtctcgtacccacaaagtcagtcctggaagcaatccaagggcagtaacacaagttgcagaagcctcaccagctttcgtcattccttcccttttactacttggtctaagtcctgagccaggttattctgtaacttcccttgtggaaaagctgagtcagcccaacataacactgttgtgatctgttgccctgtgactgccctgggaccctgggcagggagttgggagtggggtgatgtggcggatagagcttgggcaggggtaaacctgtgagccctgttccaggaagggatcacatgtcagcttctgaagcatttttaattcttgcctagaagtgactgctttcagaactgcctctaaagtatcatcttcttggttccttcctttgtttgttggttttggacagagtctccctctgtagcccaggctggagtgcagtggcatgatctcagctcacctcccaggtagaagcaattcttgtgcctcattgtccgaagtagctgggactacaggtgtgtgccaccacgcccagctaatttttgtatttttagtagatgggttttcaccatattggccaggctggtcttgaactcctgacctcaggtgatctacccaccttggtctcccaaagtgctgggattacaggtgtgagtctggcctaatcttcttggcctccaaaagtgctgggattacaggcctgtgcccagcctaatcttcttggttctttgaaaacaaaaatctgtcagccaaaacagtttgttcaaatgagggacatcttaccaggagaaaagagtccacttagccactgggcacaatgtttcaactaggagcaaatatgtgtccaatttgtgttcctattttcagtagaaacccctatccctcctctgctttctgatggagggtaccctaaaccctgactatacagttttgactttagtgattaacagctggataaatcccatctaacttaaaaggtcttggagtgggggaagaactctccatccatgaaggaatttttgtagctgtcctgggaaacctatcggggtgcctcatccgactgacagtgaggtggcagggatttaagatttaagcaagaccatgagttagaacccttgagacctgctaaacatgaggtggaaacaactgtgcaagttcaaaataagaagtagggtggaaacgtacgagggggaggggaatttgtgggggaggaggcacagcacaatcactggagggcatagcagagaggagctggaagggtcaggtctccaaccttggggtgcagtggaaactgcaagagcagggtatagaggaggatggagccagggccaccaggcaaaagtgttggttaccaagacaacatgttcaacattatctcctgtgtcctctaaggtacttaggggccagtggcctagcagagcagacctggggctgcagttgctgagacaattgtttgaaatagtcataggtcggaggcagagcaagaggatgttctgtagaaagagtgtaaaaggataataatttagtcctcttgttccaaagaggaaatctgtgcatttccaattttcagtctgataagtaagctcttcatgggcaaagacaatttacactagtcttgtgctatttttttttttttactgtagaatatatatttaattttttttattgtactttaaattctgggatacatgtgcagaatgtgcaggtttgttacacaggtatacatgtgccatggtggtttgctgcacccatcaacccatcatctacattaggtattttgtggaaaaataagaacgccttttttttatttttattttttttaagacagacagaatcttgctctgtcaccaggctgtagtgcagtggcacgatcttggctcactgcagcctccgcctcctgggttcaagcgattcttctgcctcagcctcccgagtagctggaactacaggtgcgccaccacaccaggctaatgttcgtgtttttagtagagacggggtgtcaccatattggccaggctggtcctcttttgtatctggtttgttatgtctggagagtcatccgtgttgttgtgggtagcaattgtttattcttttgcattgctgagtattattcccttgtaagacttatatcccattagttggttatttattttcctgctgatgggtatttgtgttgttctcatcttgggggtattatgaattaagccacaatgggctttctttcataaatcttttattgtggacatatcctctcttttctctttattcttttcctatttcactgactcctttattgatgttctctgttggtttctcctgacctcctcaacctttaaaagttgagctctcccactctcagttcagatcttggccctcttctccactcgcactcatgttttggatgatctcattcagtctcatggctttaaatatcttacgatgcctaaatttatatctccatctcagctctctcatttaaactctatatttatacattcaaatgtcttttcaatacccctacttgggtatttagtgggtatctcaaacttcatgagatagaaagtgaccttctgattaaaccttcataatctgttccacccctggtcttgtccatctcagctgtggcaactccatccttctaggtgctcaagctgaaaaaacttggagaaatcattgactcctctctttctctcccacctcacatccaattcaccacaaaatcccatgaaaactatcttcaaaatacatcttgaatccaaccatgtctcaccacatccattgccatctctcaagcctggtatttctgtttcagcctttgttcctctatactctttcacaaagaagccaggatgattccttttaaagcaaaagccagaccatgtcactcatctattcaaaatcttccaagggcatctcatcttacttagagtcaaagtcaaatcccttcctatggcatataaggtccaacatgaacaggcttccttcatctctcctctacacaatctcttcctagtcttgctatagccaaatttgtctccttgctgtttgtgaagaagccaaacatatttctacctcaggaaatttgttcttgctgtttgctctttctgaactggtgtttctccagatacctgcatagactgcttttttaccttcttcagatgtctgtcaagtatcattttattacgaagcattcctttaaaacaagatcatgtcctttgcaggtacatggatggagctggaagccattattctcagcaaactaatgcagaaacagaaaatcaaacactgcatgttctcacttataagtgggagctgaacaatgagaacacatggacacagggagaggaacaacacacactggggcctgctgagaggtggggtgcggggagggagagcattaggaaaaacagagagtgcatgctgggcttaatacctaggtgatgggttgataggtgcaacaaaccaccatggcacatgtttacctatgtaacaaacctgcacatcctccaacagaacttaaaataaaaactaaaattaaaaaagcattcctttgagcactttgtttaaagcattaattctttttcatactatgccatatggaaggatttaacatatattaacttgtttagttgtcgatgcactgtgtattacagagaatttcttagaaagaaatcgctgaatataaaaacaagccacttcaagaaataggcctttctcccaaattaggttataatctcaaggagattacatttacttttatcctccactatgctcaggctggtgatgttaatgcttcttgataagtatttgtgggtaccgttgaatcatagaaaaagtaatagcttaaacaaaacaaccgtagaatagtggtgaaattactgaagggactgtggtttttgccagttatgcatgatgtaatcttgagcaagtaggttgctgatcctttctgagtctcagtttcctcatctctaaagtgaaagtcataattcttttatatttgcctcaaaggtaaactcagcatgaatgaaatatgtaaagcagattatctgataaatggggttataggaatcattttggatagcattattttaaatgttacataaaagcatatataaactgtaaagtagagcacaaaatatgacattaaagtatgaaagtattgagtaattgtgtcctggacgtctctatcggtagatgtctctatgaaacattggtttctcttcagtcgttccaaagatggatgtctgagtacagtgtgttattacatgaagtctctacttttctagaaccttttgttacaggcccctggtctttgcaaagtgatcattaacttccaggtggcctcccattctgacttcggcaatgggccaattccttgattctatctcacaatgtaacttccaaagtaaatgtctattaagcctttgtgtaaacattccagacctgtaacaaaatcaactgaacataaatcatatccagagaaaagggtgtaggagaatgtgtaagtttgaaaaatgaaataatacagtacagtttcattgtggatctctggcctcagttaccttgactaagactttctctggtctacatcacagctcctccccagaggtagtggtttttggttacttcagcgggctctgcccaaatatagagaaaataaaccctccacatgaaaagatgtaaagatgcctacttgcaaatgggcttaaccaacattctaaataaaagccagattctaccatctccttgtcacttaccgtatcttgtccctattaagaagttttggctagaagtcaaagaaagcaattataataggtatggttgttttgctttggtattccttccttctttatttagaaatggatggtggataaaagttcttgcctttatgaattgatttgggaatttttttttttgcctttggacagaaggatgttaagataaaatgaaagctctctctggaagaatgggaaagagtggaaagaaggtatttcataaaagttaaggacttttgtttggtttttgccttcaagggctcaggtgtgcattctgtctttgaagtgtaaacttgtcaacttgaagatagttgtgcaaaactttagtatttccaaaaatacaactctggaagcatatgtctagagtgtgtcctgtacagaggggtcaacgtatttgaaggtaggcattttcaaataggtttttacatttttagagtagaacatttaagctcaaagaacattcttttctgcatacctagcagggtctaaagccatgccatgtccttttttatactttttattttatgaatgaaaatatattgtcagccttactctttctttctctccgttggaaattaatgtagaagaaaagatctcacccaaagggattttgatggtaaatagagatgttataaagtccgataagctttggaatgagttaccgggaaagatggtacagtatccttttccagaaattaatttaggataggtcctccctgggtgggttcctttggttttggttctgtctgaatgcacaagatggtcaaggaactttaagacttgcattgcactcctgtattcactgttgtcgttgtcttgctcatattcctttggccataccaggaagtcacttgcagataggccaagtatgtgctgatggctttctgcatccttaagcccaaatgcatatgatcctccgaggatgcttcacctatgcatggagcagtctggaagacactgttgcatagtcccagtcccagagatagctctcaacaatgagggatagaattggtaataaattccccagctcccttcagcctcatagggacagttctgtagtatgtggtatgttctgcacagtcacttcaagggtcccaagtaagactgtgcccagtttcctgcagaagtaaactgctcataaacacagtctaatggcctcccttccttccctacctctacggaggtttcagctcccacgtatgttacttgtacccaaatgctgctctcagagtctgcttctgagggagcccaagctaagacaatatctgacctcctcactgaaggaattgcttaggctaggcatggaatctgctaaccttttattttcttggctcttgactagaataattatttagcacttgctatgttccaggcatagttccaaatgtgtgtgttctctctgtctctctctctctctctatatatatatatatatttatctatatataatgtatatatacatatatacattaaaaattcaactctatgaggtatgtacaaaagctattcacattttacagataagaaagtagagacatggggtgggaggtaggtgacttgatcaatgtcacaaagccaggaaggctttgagccaggattcaagcgcaggcatctggaaccagcattcctaactactaagtcatcctgcctattcatctgaaaatcaactaaaataatggatttgaaaaaataaaaaaagcagttctaaacaaatgaaacgaatgattgcaactaaaactttctcagccatatccttttatgactctcatgtgttgagaggattttaagcaaaaatagagacgggccgcctgttcactccaatcactaaaagccccttacaagtgagttgaactttgtctaaaaggatattagattctgttacctaattactgcttgtcttttagagtcaccatgaggaagtccattttcaagaacttgggaggtttcagttgcagtggattataagaggcactggaacagctgatatactgaggtgccattaagaattatatcaccaccgaagcataatcttgctgtagacatgattgctttgggcgtaggctcccatgtcagtgccaaaaacgctaagacttggagaaaggagaggagaaagtagagctacttcctctgtatgctttgctgcttggaaaggagacagaaaaacagcaggaaatgctcacttcttctcttgggatctttcagggacctcccacctgaacaggacgattgaactttgctttggtaagggatgacttgctggaagatgaaaagccttgtggtggaacatgagtggagctcttcacagctccccaggcattgctggtgcagcacggggcagagggtgtggtacaggtgaggaggtgggtgtggctccagctcacggccgacagctttcctgttccctgctagggcagctctggcatgagcagttgggaatcagactctgggcaaagcaggagcaaagagcctttctgagtttcctcgactgacttcaatggacctgtttctagaggggcatgaaggtggctgtgacttcataagcagaatggaagtgatttgatctacaccgggcctgggaaaattggcttaggtgtggcaaaggtacagagtgtgaaacaggtggggaaaataaattcaagatcctgaacttttccatggcccccaaaggggaagccatgggtacagtgaatggaggggctgccttcagctcacttggcgctgtggtgaactgtctcagggcttggcacattgccaccattccaagacagatgggaaataaacaccattagtatgtcgataagtgtttgttttccttcagcattagggctaagaaaaataaagtggggagggtatcaagccctggagtaagcctttaaaaggtttccccttttgaatctcttacggttgtctatttataacagttacaatcacaacagagaggaaaagacttcaatcacccctgggacacattttgtcaaaattacatttaagcactttttatttgtaagcgagaagcattatcttttattatgcctttaaagcagcgtggggaagttgtgtgcataaaccaaggtgttgctgtggcctgttgtcttttgtgaacttctggaaaggatcaccaagaaggatgctctgataactgtctgccaggcaatttgcataagaggaaagaggcctttctgaagatcattaaaaatgattcattactattggtcatacacatacatgttgttttattacttaaaagcataaatcatacattggcaagtaattgtgtttatcagactattttaggccctgggaggagtagagaggtacaaagtgtggtgattattcccaaggaaagtgcattttaattagggagacaagaacaattacacgtgcagtagttaaaagctatacaaaagcctatgattaagtggtgagttgtgaataacaggctacccatgctgtgattctcttagcgatgacacaagcgacatcttggaagaggcaaaacttgagacaggtcttcaaggattggtgccatctggacaggttgaagaggagtaggagggctttcggatgtggagaatggcatgcacaaaagcacggaggtgagaatgcacatatgtgtctgggacttctaaaacagggcagcctgattggattggagcctttgggcaatgatgagtgagcaataaaatggaagagaacagggtcagaaggggcagacaggagttacccatcctcataacatgcattcacttctcaactccattacaaacccacaccaaatttttctgtgttgactatttgagtattgtaatttaaaaagagtaatccgtgtacagagccctgtactgggttacagagtctgtcttagttgagttttccccagaagcagacacagatagaaagagtccagagcaagtagtttactagggaggtcattctaggaaactttagcagaggggcaggaaagtgagacaggaagggaaaggaaggcagtcagggaagtgctattaagataccaacatggacaaatggagcaaaatcccagtggtgaactctagaaatcagtgtataaaatgtgcctcagagtgaactcatctgggaggtgaggaagttggggtatttatccaccagttgccatcagtcactgggtgagggctgcttttgagggcattaacttcctaacacttttgttccagaaaaaaagtcctaagggagaagttgcaagcgtttttagtaaagaatcctggtcctaatatgtccacatctttagaatggaagttacagcatgtgcttccaaccctctaatgaaggacaagtcatcctggggcatcgaaaaatcctttccttggccaagtttgcctcttcctatttcttaccattcattactatggtctgctctgaggcagagcaaactctggaaggatgactgtagagtttgggtcgcaaatggaagcatcagggagagttctggttataatagaactccacctgagccaatttacttttagtgcaaggagtttccaacacaactgcaatggagattaacaaatatgatagtggcttgaatttgaagaagctggagcaatgattctgtgttgggctctgggtttccagtggagatatggcagtgaactgggctcatgttttagttttcatggggaaaccaaaatggtctcgttaaaattcagcaaaccaaatatccacccacctccaccccaaccacacacaccccttccattgccctctataacacatggcacaggccagctaggaaatataaaatcaatcagtggtttaaatcaagttttttactttctctctccatctgcagcaacactttatgccagttggattatggtccattgggagaaagatcaattaaggtgaaaccccagtagagaaagcactggagaacaacattcattcttccttaataaatcttagttttaaatatttgctttgagttttgttccattaataaagaaaataagaaggaaaaccaaccaatattttgtttttccatatgccgtagtggaatcctgaagttgttgaattgaattaatgcttgattcaatgtgaggaatggacaaaagacatgcagagattcaagttccctccgtaatctggtatttattcatcaatccatccatccatctatctattcatccatccatccacccactcacccactcatccggccattcacccacccacctatcctcttaccattaggaaattcttttatgttaagtgctataagagccaattcctctttttcagtaaatggagaagaacaatttgtattataagaattagtgtgggttagattatttatatcatctttccctggtgagggttcatgtctaggtgtttcagactagcatttttccttgggtaatttccactttccctttgtaagctgatacttttactacatgtaaggtcataaactgttgttttgtaaaaaatattttgacatggatgaacaatttggagtgtagatatgaagacataaaagataacttgaaaaaatcagactgattctaacatttatgtagagaggtaaataatcaagaataattagtaacattctgaaaaagaagggtagcaagaagtgactatcctattattaaatcttataaaaactcattaagacagcatggtattggcataagaataaaaagacatcattggaacagaattgaaagtttagaaatagacctaaatacatacaatagtttaatataaggcaaagtttacatctaaaatcagtaaagaaagattaatcagggaatgaggacaactaagtcacacatcacaccctacagtataagttccaaatgaagaaaatatttaatgttaaaaaggaaatactgaaaatacaaacacgtacaaaaattattttataattacagaggagggaaaggccataagtcataaaatgaaagattgattaaaaataaagtacttgcacctggtgaaaaacaccaacatcaaagttcaaagataaatgacaagccaggaaaaatatttgcaattctgtcaaagtgtgaatttctctactcttaaaggaggcatacaaactgataagaaaaagaccaatatcaaacaaatagcagaaaaagaatagaatagtcatgtttatacaaagggaaatttacaaagaaagatcatttacattgctttaaaaaagagaaatgcaaagcaaagcataactgagatacaatttcacctgtcaaattggcaaagattcaaaagtttggtaatacctggtattggccacagtattggcacaaacaggctttcaaatacaaatagtggggatgtaaatggcagaagttggcaaacgatggcttgtgagctcaattcagcctgctgcttgcttttgtactgcccaagacctaagaaccatttttaagtagttgaaaaaaatcaaaataatattgtatcgtatcgtattgtattgtattttactgtactgtattgtattgtatattgaacatttgctaagaatagattttaggtgctcttattacacacacacacaaggtagctatggaaggtgatgcataggttaatttgcttgaacatgttaatcatttcactatacatatgtgtatgaaaacaatcatgttgtatactgtaagtatatatcaataaaataaaacattttgtgacacatgaaaattatgtataattcaaatttcatgccttaagttttattggaacaaaatcatgcgcattcctttatttgtgtctatggctgcttttgtgcgccaatggcagatatgagtagttgtgatagagactgtatatcctgcaaagttgaaaatatttgctttcatgccctctatagaaaaaatgtccttacctgttgccatacaagttggcaatatctatcaaaattacaaatcctttttgacctgctgaatccatattttcttttcctacagatacacttgcataaacatgacttgacatatatccaagatattcattgttctagtgattggcaaaagattgatgcagtaaatggctctcaataaagggctggctatataattataggatatcttcacagtgaaataccattcaattataaaaaagaatagaaaatgattcattcattacactgaaatgaaatagtatttgaaatacattaagtggaaaaagcaagatagagtggtagataagatggaaactaccatttgtgtaaaaaagtaggataagatatgtatacatatgtttatacatttgcccacacattttctctctcacacacatacaaataaattatctctaaagattacataagatgtcctgataaccaaacatttgttgtcagggttttcagagggtagggtaactagatccttagggcccaagggcaggagattgactttcataaggttttatacttatttttaatacttttagaatttttaaccaagtgatttttatctacgaaaaaatattttgaaaacttacctccccttaccgcttctagtcactgttcgtctcatgacctggtaatattttctccataccatatatctccatctgaaattcttatttttctgtttacttctctaacatcctttctagactatagactctttcagagcagtgaccaggtctgtcttgctggtacctgaagccttgttggatgaaggaactggctccatgggatgagtggtgaggctgtgtgggataggggtttgtggtatgggcaagggatctctgtagcaaagatggactcctgcagagtgcatgcaaggttttcagacaatggggatcataatttcaaatccttggtacctccaataaatccagccttccatcaccaccattatcccagctgaagactgaaaggtgcaccagcagacaaatcagcaatctgcaaacacaacataccaaagagcttgccacttcatgtgggcactcctggtgttatatgttcaaatgtgcagcatagtttgtaatagacaaaaattggaaacaatccaagtgtccatggttaggttcatggttggggaaatgttgaaatgccatgtagacatgaggaagaagagagagcattataaatggacttaaaaagatgaccataagatatacagtaaagaaagcaatttgcaaaatagtatgtatgatatgctcttgttttaaaaaaagttatgcataaaaaatttaaaaagagtggcacattggtgctgcgctgttagtggtaacagcataatggggacctgtgtggaaagggaatgtcatctcttatgttgtatatttctatggggttgaatgttattaatattcataaatttcttatgcaattagaaagggtaagtgaatccacattggtatatcactccatgtgtaaatgtctgagttcctgacatgggaatttcacaataaggacacacataacttacctacagagcccagggaacggtaaacaatgggaaactgagctctagaatcttgaaaacaaaggtggcagtcaggactcatgaaatctgactcttgggaactagcaggatatatttatttgacattggttcctccaaagtgaaactatacaggccaggagatggagggagggctagcatggttgtcagagtatgggggccctaatgctcaattttaatgatgtgaattttaataaatttaaaataacaatccaaagactgatatggctctagaatgggactgaggagcaatgtccatataccgcctcctataaacacccgctttctttgttatgatgtcctgttcttattttcttaatttttcctgatgcagctgagataacaagacagggtggtctggggctgggcccacagacacctggattgcagtctgtcctctcccctggacttgccctggggcgtcgggttatccacaacctttctcacttcctcagtttcccatccccagcaagggactgctcccgcttgagcagagtctcaggatctcatatgaggttgtgtgcgtcatgggattagggtttttcctaggcaaatggtttctataaaattatgtgtgtgtgtctctctctgtgtgtgtgtgtgtgtgtgtgtgtatacctaatctcacactcttttttctggcatcctatctagaactttctattgtgttccctctgtgtcctcactccgatggtcagcatgcagcactaggtctgggaggaggatttagatatctgcttcaagtccatctgtttgtgaatgaaactctgagaggttgaatgatgtggtctagacagttcttctcagacttcagtgtgcccaggaaccacagggagagcttgttaaggtggagatcctgatttagtaggtgaggggcagggttgagaatctgcatttctaacaagctgctgagagatgctgatgctgctggtccacagactgcacttaaaagaacaggcatgtaggataagtgcttctcagaggcagaggctgaactgggcccagttcccccgactcacatcctgtgctctttcctactgaaggcataattatcaatttagttgctgcaagactgaaaactgtcacttacacatgaagctgtgtgtcagaattactttgggaacttgtttttctttttaggagacaggatctcactttgtcacctagggtacagtggtatgattacagctcactatagcctcgaactcctggactcaagcaatcctcccacctcagcctccctagcagctaggggctacaagcatgtaccaccatgctcagctactattttattttattttattttattttatttttgtagagactgggtcttgctatgttgcccaggatggtcttgaactcctggcttcaagcaatcctcctgtcttggcctcccaaagtgctgggattacagaagtgagccactgcccctggaactgtacatttctgaacctccttcctagagctcccacttggttaatgtaggtggaggcctgggaattagtattttgatgacaccctgataatttcgatttattcagtccatgacccattttaggaaactactgcctgagtcatttaggaaatattaaattagatctgatatgatctgatttctaaactttattttaaattgttattttcttcgtatatattgattctttgtatatttcttattactttctaaaccactgtgaagttcaatgtactgaagaaaactcatgtccataagtgaccctcccattctaaatacacaaatacaatcatcctgagcctgaggctggactgttagggaccgtatattttagacttcaaagacactttgaacaccttttctagaaatgcatttactaccacctgctttttaccctttttttttgtatatttggattaatcaaatatcatcttagagtgaataacatctaaaatgtgttccaaaaacttatattccaaagatttgtgaatgtttactcacattaccatttatttattttttattttttttttactcttgtgataaccaatcacctgtgggatttgctctttcaccatcaacgttcctgttgttatttggttggggaaatcattcaaaagcagctttctgctagaagagtcatgttagcctgggtggttcatgtcaacctggggagggagcctgccttttgggatgtctctccatcctctatggctctcagtattgttcctcctgaaacacccaaaacacagatcaactcactggccttgtcacaagcacagttcagagacatgtctttcccaagctctcagggaagagctgtactatgtcttagcacctgatctctagcaacaagagactctttcatattttatcagcaattaattgcaatcacttctgctttatgagctgacaaaggccttcatcttcatgcttcagtcattgtttcctgatttttgttgggactcagggatcacctccctgccatggttcacaaaggtgctagcttagatacattttccaccttgcaactgggtgaggcagtgactgaatcacgtgagtccaattttcacatttaataggacatgaattattgttgaacaatgtatcctgcctctagcctactgtgggcgattaagaacatgctttgcgtgcataatgacatctgagtaatggaaagagagtatgatatttcaaaagcattggcatctagcggaaaattttgaaagcatcaggccttggcctgttgtcatttttattctaccttattgagggcccatgatacaacagctgggggtgatgataatgatgtataaagtacaagatggggtacagggtgatgagtggtggcttcattctgtttagctgaggatggcccattctttacatctgtcaggacacaatgatttggcgaccctcaaagtacaaataaaaatattgaaagatcagatgaaacaagtttggatcgttgagtcatttcaaataactgtcctaagaaaagggaaatgtcaatgagtttgagaaactaatttgttgttttgacaagaggtagaagcaatgatcctagagtctcagtgttctcagagtctagttgagtatttcatatgttgttctccacagctcttacttattttatatatactcaccttgtctccaaacagactctatttcccaaagataaacaacagtctttatattttggttttctctagtatagcatggaacccagttcctagcgcataatagaaacttaactgatttgcttttgctattactatgactatattattatttatattattatatattacatatatttattatatgtaattatataaaaattattattattgccttgcaattaataataatagtaacagttagggagcctagactccctaactatatgatccagttattagtctgtgtgctttacatatttgcccattttattctcaccataaactctgagatggttgtattacatctcttctgagactctgggagaaatgttaaaacttgcaaaggcagaatctgaatccttgtgttttgtattcttttcaccataccatgtgcattgctgcattgttgataacccttgttctgggtctgagatgtttctccttaagttaatgcggagcctgaccatccagatctatcttcaggctcctctcaactcagtggatagttgatattatcttgagaaacatgtcaaggtagacttagagtgagcccaaagggtgtgcactctgctgtgatgctcttgaattatttctgggttttagataatttctcctggggttagatttagtctgaatcaatatattgagctttggaatagattgcccttatcgtagatctacctttgttcttccatgatctttaccatctacacacttgaaaaggccaaaaaagtcacattgtgtccatattccagagcctgtgataaaaacccaacagcagattgaaaccctactctacttgcctttctcaaaaacagcccaggtagaagtagagggaaagaagcaatggggaagaggcccaggagaagagaatcagcttaccctgtaaatttaatctaatggcgggaatcagtcactgtgtgaccatattttattgctggaaagttcttgtgctatactaattttgttagaattgcctgaagcctaatatttccaacatagcactcctggaagcttctattaaccagttggagttggcatataggataaaaactatccatgatctctgatttagagggtttctttttaataacatgtttttattttttatttgcaaaacaaaacaccagggcaatgtgtgctttcattttggtggaggccacggggcttcccttaaggcagacactcagctgttgggctggtctcttaccaaacccaactggcaggagtagaaagcttcctgtctagttgattcttctttcaagcagtgagtgatgtagtagatgaaaagaggagaagtagaattaactctgtcctgctgttatttggaataaaagcacataggcttttactggatttagatggtcatttgtcttacttgggtaaattgaaaattctatatgccatcttaaaaccctacagcatctttcctgaatttttctgtaagtgaaactaaagggaactcaaaaatcttcaaaggtagtctagacatgcaagagaaacatgtttttggaggaaaacatacaacttatatgatctagaatattccaagatatttgtggttggtttattgcagaaaagtctcaaattttctattactctctgtgttcatgccattgaccatgtgactttgcagcttattccatcaagaggtggaatctgttttcccctcccactgccccttgaatctaggccatccctgtgactcgatttggccaatagaatggagtggaagggatggtgcgttcaatctgagcctaggcctcaaaggccatgattcaatctgagcctaggcctcagaggcctcatggcttctgcttactctcttctgccactgccatgtgaacgtgcatggaatatcattttgtagaatatggaacagaaatgaaccaccttagctgagggcatcctataccagccagcccctagctaatccagtagttacctgcaggaacatgagtgaatccagctggaatcagttaagcctggcatggctcagcagaaccacttagctgatccagacactcatcagcaataatacatggttgttttaagccactacgttttaggttggtttgttatgcagcaaatgctagctgatacacattgcgatgccagtgatttttttcatgggtaatttatatagcatatgtagagctatgcatagtaaatttgacatttagtaggtatttaataaacactggttctggtcttccttccctttccctaaagagatatacttccagattggagtttgcaggttccagccagaaaatagaatagcaacttggaagtcacgtcacaaaggtgtccatgagtgagggattcataacagtagtaaaaataggaagtcgtttttttctgaggctagacgagacactgatgtttcttccttgccttcctaaacagcaactcttggtgttatcacttcctgggagagaagaaaaaaggagacttcagacatttaaaaactcacccctgaattctagtcaattaaatgacactgtctctggtttatatattttttctttaacaaaatttgtcaaaatatagagagtactgttacgaaaattaagcatcttgggtctgtgtgaccttgtggaaatcaccaactctttctgggtctcagtttcccatctctcaatttggaaagttagactctcccatatgattcctagctccaaccatctatgactcttctagcagcactgtagtgaaagtagaaacgtaagctccaaagcccaactgctcacttggaaatgtggcctgatgctttctatctatatacccttagacaaattaattataccctctgtgcctcagtttccttatctaaaaatgaggctgcctcatggcaaggttctgaggattacatgctataatccatgtaaatggcttagaacagtgcctggcacacagaaactgcttaacaagtgttagctattatttcctttggcatagagtcacatcttatgcaacagcactttcatgggatttaaatgttgaaagttcaaatggtgaacatcaaccaagtggataaaactgcaagatgtttttgaaattcacatacacgcaaaagagtattaacaaccatcctcaagctcttatatccataattcaaaagggctatttttcctcacctagttaggtgtggttatctcatatagtagaaatttaccactttagctctgagcttatttttctttctcttttgctgctactctttggctacaagcaagaggaagtgtaatgcaatattaagaaaatgggtcctaactctggttctgccacttactaacttgattagatttttagttactctgtccctccattttctcatatgtaatatatgggtaataatcaagcctgccttatagattattgtataaacacaatacatttagaaaagtgactggtacacagcaggcttttaataaaacactatggattggtatattattatattctgctccactagaattgtttaaaggaagcgttaggaacccaaacattgtccaaaggaatatctttagggatgaagtaagatggtacgtatgggaatgcgattgctgacccactcagatccccttgaccagactggtgtttccatatccacgtgctattagcattggctcttaatggtttacagctgcctctttctttggagaattgctcttggccagatgggagttgcctagcctggaattgcctgggaagttatgcaactcccttgcccctgggagtggccagcagccaaggactgactgatgcaggggcacaaaaggaccctttgcctcaaagagagggaggcaactctgtggtgcaatccatgctccagtgctccctgtgggatcagattgagattaggctccagctgagaccacacccttagtttgcttctcctttttttcctttctcctttatcagtaaattacttccaagtgaatcctcactttgggctctgcttctagaccctgacttaagatacaaaggaaggagaaatgaaccatgaacaattccagagattttgagacatggcaattggactttctgtcagggtaaacatcacaggtaggtgtagttttgattccattcaagtttctgtttgggggaaaggctggaggggttcaataggagttgagatgacaacaaggccttagacaacgtcatatatgagcccgccatagtgggctctgtgctactgaggtctgtgtgtcaaataagcgcgtgttatcttagtttgagcttgtggtaaaatacacatcccacacatagattttgatgagccatgtgatcattacaaaaattagtacccactagacttagagtcttccagcacccaagacacccaagacactcaagacactctccatactaaattccattccatagtcaaatcttttgactatgtagaaatccacttttttgttatcacaattgccttccttccacactcatcaaagaagactgtccccaggactttggggatgaattaggatgatagctatgaaattgtatgcttacaaagcactggccaggctggagcaaggagcaggtcgtccatggcgggattcctataatttgttccagaaagagatacaagataaaattatctgatggtgccataaaaagaataaaatcatgtttctcagtaacatggatggagctggaggccgttatctgaagtgaaatgattcagaaacagaaattggaaaaccacatgttctcacttataagtggaagctaagcaatgggtacacatggctgtgcagagtggaataatagacactggagactccaaaagcaggagggtggtagcgtgagggatgaaatgccacctattgggtacaatgcacactattcaggtgatgggtacatgaaaagcccagatttcaccactgtgcaatatatccatgtaacaccactgcactttcactcccttaatttataaaaatttaaaaaattaaagaaaaattactggaggtgtaggtttgggcttgtaagtgcggaagaaccagccacccacttaaattcaaaggcccattccatcctgatgttttcatggaggagtgcaatacagaatcttcccagagtgttctttctcctaaaaaacggggcagggggcaagggatcagctctcattattctttcattctttccccctctctcttttcttttacttcaatctacatgtgacatcttataagcattttcctgtatgctcaatttaacatactaaagaacacttactaaaatgagttattatttctatctgtcaaaggatcttatgaaatttgtcatttgcttctcaaaaccatgcaatattatctataaaatagaactgggtgcagttttcttgagcattaactaaaaatgatgctatgcaatttgtactactagttttatattaaaaagggcacaataatgtagaggagtaaataaatagtacatgaactttaaagataaacacgagatttcagggaaaaaaattgcaattatgagggactgttatgagttcacccctcaaacctctggtttagtattattagtaaaaccattagcataagtgttctcttatgctaaaaggataattttggtggaagtgtctgagaaacacttctacatataatatccaccagttcagaagataacataagcaaggcttcaaaataaatgtgcaacaggagggaggaaaagatgggaaaacttctagcgccattttcattccgagactgaaaatgccaatagtattccaagtttaggtgactactgcataattggctaaaacatagctcaccatattctttggaacagtgaagaattcacctcagggagacacagatttgctatatctcatgagggggacaggtctggtacatggccactcgaagcttgcttctaagaagtgattgagtggacgcccgggaaatgaatggtggcttttaagattcattgtccaggaaataagagagttatgttgtttcatgagtaaattggaggctgtttagtcctggggacttttcaggcttaagagggcctgggagaaaccttccttctcatgattctaaatgactattaatgttgcagccactctgcaactgtcagtgtgtgacgtgaattggactcaggaattatcgcaggtcagtgagtgagactgcatctcctcatgcgagaaaaccatgacacttttgtccagcagaagtgggagtctttggggctgaccaatgagttgcagagatggtgctccttcagaaaaggcaggtagagaagtcctgctttttttctgggcagagtgacttttattctgacatctcagcttcccaggagagggtggtacagcaaactcaggaaggtagtttggagtcggtttcgaaccgtgttatgagcagccttttaataaggtggcaagatacaaagcatagaagagagtttggaaatgagagaccatctcatggtaaaatctagaagatggtgtgagaatatcaggtctgaaaagagaccttggaaagattaggaaaccagaccccatcgcttgatctgcaattcgttgtgtcttctcagctcatggctctgctcttggagatactgtgtttaagtttttatgcactggttttttttttttcctttttaaaataaaatcttgggcaggcagagcctactcttgcagggcctgaggcaggatggagtggggtgcacactggttcttttgatcatgatttcacttcaagcagtggggatagatttcatgtttccttcctgccctttcccacgaagcatgcaattgagtgggtggctcagtcagaaatgcccaataaatatttgccaatgaacataatggagcaacactgatgacagcaaggggtttgtcccatccctactgtctcttggaggtggcacaaatgtggtcctgacaccgggcctacgggagactttgtggcactctctgagcctggaggcctggccatgatccatcttacatcgttctacctacctgagttccctatgcagttgctgccttccagtgcttctcatttcccagaaaaggaatcactgtttctcctaacgagtatgcagacggaggagggaattaaggagacaagtgaaaaccacccagcaagaggacttgaatagtgtgcaggggagggtggtgaaaaggaggaaaggaaaaatgtatcaaaacaatattatgtcagttctataactttccgctaatccttatgtggatttgtaccagcgttcatgtcttacagtctaagacaagagccagacaaaaatgcttggacttaataaatctaggagagaggtttgtttatcaaggtctagcattgtttgaaaactcaacatctgttgaagactcgtaggcctttgccccccacactttgtgcaggtgcttctggtcttatgacactggtgcatggattttaaagaaacattcagtgaaaaaagctcaaggtcatctctatacattgccatggcctctgctcctaacaaggcctcctcatctctcgcttggatagttgtagcatttccaaatgggtctccttacctcccattatatccacacagcccactcctcacagcaagttagtctttctaaagcccagaatgtgaaaactttctaatacacccctaacttattaatagggatcttcaaattctgaaatttttgttaagaaacaaaacttggctaccattcttccttaggtggtcttttcttacgtttttaaatgcaaatattttataaaagtataacataagtgtagaaaaatgtgtgtgttgatgaattcttatacaatttgcatgtgcatgaaaccagcagccggctcatgaaacacaatacaaccagcaccccaaaagcccctcgacgtccctcctagtcagtattcccccaagggtaatccttgtcttgacctctaatcccatggatgagttttatctttttggaactttgaatagatggaaccatgcagcaggaattctactgcatcagttagcatgatgtttgtttcatccatattgtgcatgtggttggagctgattcatgctcatcactgtataatgtttcgttgaagggatatttatttacccattttactgttgttgtttttttctttttagacagggccttgctctgtttctcgggtagaagtatagtggcaagatcaggcctcactgcagcctcaacctcccaggtttaagcattcctctcatctcagcctcctgagtagctgggaatacaggcatgcaacgccccatccagtcaatttttaaatattttgtagatatggggtcttactatgtttccaaggctggtctcaaactcctgggctcaaatgatcctcctgccttggcttcccaaagggttgggattacaggcatgagccatgagccactgcacctggccccattctactcttgatggacatttgggttgcgtccagcttttgggaatgataaatagtgtggtaatgaaaaattttcctaaacaaggccccaaagtgccgagtacaaagggaaatgttgataaattggctatgttaaattaaaatcttttgcctttcaaaagacatcgttgagagagaaaagccaacacatagaagataattacagtatatgttatctggagaaagaactcatttcttgaatatagagagagcttctattaatcaataagaaaagtgcaaatgactcaatagtgaaatagtcagagacttcaataggtactttacaaaacagcacatccaaatgccaatggtccttaaatgcatgaaaagttgtgcaggcaatatttttcagctttactagtctcttcactactcccaattaagccatactttcctatttcagtatttttgcacagatttttgaacctacctggggtgacttgacctccttttccacctccttattttttaaggaccaaccagaaaatcagctccttccaaagccttccccactcctttaggcagaattaattgttgcttctgtaggatcccaaattgtgatttttctcagagtgagatgtttcattaatctatcttcaggttcccagtatacagcattgctcttggtgcataataggtgatcaatacatggctttctgaatgaatgtctaactttctcctcaaacctccagataggatttaaaccaatgaggtacagtggtaacaaaggcttgctgtgttgaacgggagtttttattagccgatacagaggttacttcatacggaaaaatgctggcctatttcccaaatcatagctcattttcaatgaatagtatcatcacaaacctgtgaacaaagacctagtactctataggttgaaagacatgttcatatatatatatatatatatatattatattaataagtaggtctaaaaaacagctttgctattcagaaaggtcgctgtggtgagtggtgggagcaccagtttaggtcaggaaacttccttgttgtatgatataggcaacatttctgatcagagcaaattttcttttgtcatcatcctcatttcctggtacctctttttccccccatccccccaccactggctcgtgcttgtacagggttctcacttccccaaacccaaagtgtttcgtgcctccaacttgcttgtttccagcctcatataatttcttcaatcccaaccttttattcttttactgttctaccttagtttagtttagccagatgataagaaaaaacttgtttattaagagaaggacctgtccttctcttaatacctttcacagagtggattctcaaaacatatttattgaatcaatggcttggcaatttcttaccaaagtgggaatggttaccagctccttaaccttcacattagcttgactgaattttcaacttatgggattgtagctgataagaaaatgagtgaaaatgtttaggaaagcatatacaaaaagagattctgaggcagataaagcaactttttcttggaatttgaccctgggaccttaggttgattctctaaacatagtgtttttctttattttactttggaaatttattttctaaatcaataatacacccccttcccttttcagagaatgagaatctccctttaacattcaaacaatctttcatatccaagagtattaaaattgataaatatcaaacgatcaagtcttactctgaattgaatgttttataataaagtgtatttcagtagcatgatacccatatgtatttgttgttatgggtatatatttgtatgaaacatattattaatatatgtttatagataaagcttggtgtgaaaatcaatccatgagtccttgtcaattaatccaaggactcctggatcactgttgtaaaagctgcaccttttgtccccagtggtattaacaacacacagtagcaattgtttataacacagattgaatgttaactgggcactgcctaaaattatcagcgggatgaatgctgactttatgaactgttatttatggcttgtcttaggttgggttccctagaagcctgagacagggatttggggaaaagttatttattgagggagtgctctcagaagaaagggagggaaggagaggaacagggcaggaaatgagaagaagcataaaaaagatgagattttgggtaaagtgtagcttcagcctgatcctgcaaggagctctggcgtgtgaatggcaccaccagtttgttctacctgagaattgagagtctgtccttccttcacaagtcattcgttgactatgggatggctcagggggattgtaaactccttgcaggtgaggtggctccagttgctcaatagtaatcctccagagaatgtcgcaggcatgagttcagagcacatggaccacatagcagctgaggatgcacggaactggtgaacagatctggaaagggcactaagagcatgtaattgttacatggctttattcattcattcgtccacttaatatatatttgttgaatccctagtctgtgcaagttcctcagatagagtggtgaataagttgaataaggccttattttcataaagcttacagtttgtaggagaatacagaagtaaaccagtagataactatagcaacaaggtaactttagagattgatgattttcttagagaaaagataagcagttcaataggttgtggaatgactggggcaaagggcaggcccaatgaaagcacttttggttaaatggtcagggatggggacttgagcagagataaggagcaagccgtgcaaggatgggagtgtgcaacattttggcagagggaatggccatcgtcagagccctaagatgggccaaagctcaatgcctctgaagaacagaatgaggtctggtaagcctgtggtgcacttgggagagttgtaagaaaagggtggaaaagtgggcataatgcacaaaggagtccaacattgtaagaagttgggccatcttgtattccagttgtagaaatgagttcttggatctgcattaagatgggaaagatagcaatttgtcagaccgtgacttaggtttgccttaacattgtctattaaaaacaggggtttactaagcagattaataaaataaacaaggaaaaatttaggattaaaggacatctcactgttttcaaactccagaagcatagcaggcattgatttcagacattttatatggtaattatgagaaaaatttctctttgttaaaaccttcccaagattttaaaagatatatagctggactcaaccttcctttgtccttggcaatgtgacaaagcagcatttttagaaaagaatgtaaattggacttgaccttggttatacacagggagagttatcaaggtcattttattgggattttgtttgtattgtaattgctattaaaatgaatcaagaagtaagtatagaacatctctttttcgttcaacattctgctctgggtactgagactgcaagtcttaaatgcagatctatttctccattctcaagtaatgatgtgttttccttaatcttctccaagtccactggagaaggtactatgattgcaaatgctactagatcaacatcacggaaaatgtttcctagactttattcctgaagaggataatacttgcagactatcagcctccatcaaagctggtgaatgaaacccactgaacctgtataaaagaggcccaggaaaactgtgtttttggtctgatctatcagatcatcattgaagatcaagatcagagaacagctctctaaaccgaagcaaacttaacatctcaaaccagaatgaactggaaatataagcagcatttttattctttctaaaaatggatttttcaaatagttttgatttatcaaagattcacaatcattttgtcatattctttcccacatcaacccctgcctttacgcccttctgtgaaacccacgtttaatttagggggaacttaaatccatatatttctgattcatttgctcgatgttctttgggaaggcctagttgatgtacgaagagtcttatgataacttttataagcctttaagaatttttcttggagacagaaaatcatcttttcaggcttaaggtgatcctcaaaatcagaaaaaaactctggcttattggaaatggtgctttgagggagtcttaaactcaggcatttgtgtatgtgtgtcccaccccagttgtgagctgtgcagcaggtagcagataaatagcccctgagaggtgggagaagcacaggaaaagggacacaaaaagaacccgaatagtgtaaggattcttggacctgccatgtttttccatttctgaagagcaaccagggaagttccacaacctataaagtcagattcaatctatgaagcatatctaaagccaaatgattgtcaatcaactttgtatagcatctctgagcaagtcagagaatgctaggacagctttcagatttgtaaatagcataaggcttcatttgtaagtgcacttcactgttgctcagcactgttcagtgaccagtcttcattttttttttttattacactttaagggctgggttacatgtgcagaacatgcagttttgttgcataggtatacacgtgccatggtagtttgctgcacccatcaacccatcacctatattaggtatttctcctaatgttatccctctccttgacccgcacccttacaggccctgggtgtgatgttcccttccttgtgtccatgtgttctcattgttcaacacccacttatgagtgagaacatggggtgtttagttttctgatcttgtgatagtttgctgagaatgatggtttccagcttcacccatgtccctgtaaaggacatgaactcattcttttttatggctgcatagtattccatggtgtatatatgccacattttcttaatccagtctatcactgatgcacatttgggttggttccaagtctttgctattgtgaatagtgctgcaataaacatacgtgtgcatgtgtctttttagtagaatgatttataatcctttggatacatgcctaataatgggattgctgggtcaaatggtatttctagttctagatccttgaggaatcaccacactgtcttccacaatggttgagctaatttacagtcccaccaacagtgtaaaagcgttcctatttttccacaaagtctccagcatttgttgtttcctgactttttaatgatcaccattctaactggtgtgagatggtatctcattgtggttttaatttgcatttctctaatgaccagtatgatgacgattttatcatatgtctgttggctgcataaatgtcttcttttgagaagtgtctgttcatatcctttgcccattttttgatgaggtcatttgcttttttcttgtaaatttgtttaaattctttgtagattctggatattagccttttgccagatggatagcttgcaaaaattttctcccattctataggttgcctgttcactctgatgatagtttcttttgctgtgcagaagctctttagtttaattagatcccatttgtcaattttggctcctgttgccattgcttttgatgttttagacatgaagtctttgcccatgcctatgtcctgaatggtattgcccagatttacttctagaatttttatggtcctaggtcttatgtttaagtctttagtccatcttgagttgatttttgtataaggtgtaaggaaggggtccagtttcagttttctgcatatggctagccagtttttccaacactatttattaaatagggaatcctttccccattgcttgtgtctgtcaaagatcagatggtggtagatgtgtggtgttatttctgaggcctctattctgttccattggtctatatatctgttttggtaccagtaccatgctgttttggttactgaggccttgtagtatagtttgaagtcaggtagtgtgatgcctccagctttgttcttcttgcccattattgtcttggctatgtggctcttttttggttccatatgaagtttaaagtagttttttccaattctgtgaagaaagttagtggtagcttgatgcggatagcattgaatgtataaattactttgggcattaaggccattttgacgatattggttcttcttatccatgagcgtggaatgtttttccatttgtttatgtcctgtcttatttccttgagcagtggtttgtagttctccttgaagaggtccttcacatcccttgtaagttgtattcctaggtattttattctcttcatagcaattgtgaataagagttcactcatgatttggctctctgcttgtctgtttttggtgtaaattctcttttacactttcagagtctgcttcaatggcataggtgacataggcattggagccctcatcagcatcacttgcaagaactttaatgactaaagtccccgtagcagcactgggtctgatattcacttcatatttggtcactcgaaattgtggtgtattatcattgtcatctgtaaggatgacattaactgtgcggaaagcaactttcccaccagcatccttagccattaaaccgactgagatcactttctccgctggggtttctcgatcaagtttttccagagtaagtatctgtcctctctcatttatataaaatctgtctttggcaaagtcatttacaatatgttaagtaacgtgaccataaataccaaaacccccatccgtagttttaacccctatcaccagggtatgtagcggagcgttttcagctagtttcacttcatattcattctgaagaaaagcaggactgtgcaaattttctgcaattacagtcacatgaacctctttttttatttttttttttgacggagttttgctctgtcgcccaggctggagtgtcatggcatgatctcggctcactgcaacctctgcctcctgggttcaagcaattctcttgcctcagcctcccaaatagctgagattacaggtgcccgccaccacgcctggctaagttttgtatttttagtagagatgggatttcatcatgttgtccaggctggtctcaaactcctgacctcaggcaatttacctgcctcagcctcccaaagtgctgggattacaggcatgagccactgcacccggccttcattttctaaagagcacaataaagtgtaaagatgaaaaattgttgattacagagttaaacaagttctactaagaatatgaagactgtgggctcgttagggacacatgaacaatcgctggacagtgtgtgcaaaagtataagaataattttctttgtcccatttatttcagctgtgctatgaccttttttaagcaggctttgagggcacctgatgtctctgggaaaagaatgatatataaaccactcatttaagccaagtacttggcaatgcatgcacgctcatcagaaatgggtcattttattgctaagagcttggactcttcctggctcgagtgtcatttttctactaaggccagaaatgtgctccactatcatcatcccaagtttggccaatttttccaaagccagtgtttatacaatcctcctaaaaagttttctagcctcaccaggctgcagtggggtgacttggaaagcagggatgtgatgaaccttcatctcaatgaatgccactactatctatgtaggttttcaaagaaaaaaaaatccagaacaacacttgattcttttctttttatgctttccaaatgcaacctatcagcaagttcaagaagtcttccttctcaactgtggtcatcaaatcagcaatattagcatcacctgaaaatttgttagaaattcagaatctcaggccccgtccctgacttgcagaattacaatctgctcttcagcaagcttcccagtgattcttgtgcacattaaacttggagaagcccctccatgaaatacctctttattcactgccatctcttgcctggtttattgcaattctttcctcccttctgctcttgtcctcctttagcctattttcaattcagttaccagagtggtcttcaaaaaaaaaaaaaaagaaagaaaaagaaaaattactgaaatcaatttacactgctctttaaaacccaaagctctgcactgcacatgaatatctgaacttgccatcacttaagagtcccatatgaagtggctcatcttcccaacccctctcaaccattcttcctggtctgttctttagccaagctggtctttatctatttcagcctgcacgagctttctctttgtttggtgttctttggcaggacttctcatggcttttggtcatcagatttattacaaatgtcacctacctagagaattcttcttggctaccatcttagttggtttgtgctgttataacaaaatacctgaaaccaggtaatttacaaagaaccaaaatgtatttctgcacaattctggaggctgggaagtccaagatcaaggcactgacatgtttggtgtctggtgagggctgctctctgcttccaagacagtaccttgttgctgcatcctccagagtggaggaatgctgtgtcctcacatggcggaagggcagaaaggcaaatgggaggggcctaagtgagtttccaccagccatttagtatggcattaattcatccatgaaggtagagctctcattacttaatcacttccccaaaggctccatcttctttttttttgagatggaatctcactctgttgcccaggctggaatgcagtggcctgatctctgctcactacaacattcacctcctgggttcaagtgattcttttgcctcagcatccaagtagctgggattacaggcatgagccaccatgcccagctaatttttgtatttttagtagagatggtgtttcaccatgttttccaggctggtctcgaactcctgacctcaggtcatctgtctgcctcagcctcccaaagtgctgggattacaggcgtgagccaccatgcccaactggctccatctcttattaccactacagtggggattaagtttcaacacatgagcttggaaggacatatagaccacagcagctaccaaatttaaatatacctccaattaaaccatacataccatatcattctcttttactttttattgctttctgaattatctataactatcttgcttatttgttaatggattaatgattgttatccagaatggatactctcagaaacttttcccattttatttccagctatattatcaacacctaaaatggtacctggaatagaaaaggtacttggtatatatatttgttgaataaattagtgaataaattcatatctatatgatctgaacaaaaaccagtgtcttgccatttatgttccttcctctttcttttccttttttttttttttttttttttggcaaatatttgttaggcacttaacctatgccaggtataaggataaccaggggaggggaaatagatcttgacactgtccatgtggagtataccaggatgtagcagagaataataactaaaatcacagcaatgctgtctcatagagtatataaacgttttcctaagttagttcaggggaccaccatgagctgtggggctacaggatgaatacatgctaaacagcagaggaaagggaagagagtagatggggagagcatttcattttgtgcagaaataataatgaatccaaaggcaacatggcatattgaagagacagaaagagggacccagagaataactggagaaccgtatgtagtggggctggcaggcaggtagccagagcagtagaaccttctgtgtagggcaactataagtcctgctttgcctgggggatttctggtctacctgtgtgatctgctgtaattattagtagcaccctcttttattgtcagaaagtgttctgatttggattaggaactatgtggtcactcttatgggccatatcataggcatttatattcaaagactcaccataaagtcttgtggttaagaatgatgactctggacccagattttctggagtcaagtaagtggtttactattatttgcattatgcatccttaggcaaattgctaaacttctcagccttggcttcttcattgtaaaatggggattcaataattatagtatttaactcatgtaattttaataaagattaaatgagttaacacatgttaatcttgtagcatagtgtctggtatacatagtaggtaggtactcaccaagtgttagctatattattgttattattaatattttaaaaattggcttattaatttttagagacgggggtctctctatgttgcccaggctggagtacagtggctattcataggtgtgattataaagcactgcatccttaaattcctggactcaggtgatcctcctatttcagcctccccagtagctgataccatgatgctcagctttaaattttagtgtatgaataataatgggaggctgtgaaagatattagaaggtgttgacatcatcagaattgtgtttttcaaaggtcatttagactttcatgtgaaataatatttcagggaaagcaaggagaaaatgcctatagagttctccataaaatgactagtacataataagtcttcaataaatagacaaaataagtgatcatcatgatcttaattatcagcatcttgtagtacaaatagaagtgttcagaagtaatatagttcgtaaatattttctattactttccatttggtagtatttggggacaaagcagctatttggaatttgagagtcaactcagagactattgtcttagaatcagtagaagttcaaagatcagagttggagggaccacccaattgactcttgtaagtcaagctttttgctctcccaaaaggaatccataggattacagaccctcacttggagtctttggattgcacaaagtgtttctatatgaatgttcgatttggtatgcaataatttccagggcaaaattactcagcaacagcaagaagggttggaaggcttcagcaaattcctcccggtgggccttgacttgaacttttcgggtctggactatttcttccacagctccctgacactcctgttaccccaagggtgagaggaagcgatgtgagtgaaaaggggcccctttctcctgaggttagtgcgggagacacctcatagtcacttgtcactttgcaattcccctctcccaggagtgtggagaaggattacagaaacctggcagataattaacattgccagtgtgaatggaagggatttgtcacacaatgacttgagcaccataactttctcactaaacctggggaaaaggtaaggatttatgggaaaatcccatttaagaatagttaaggaacagggggcattatggtaaattgttaactattcagttaaccaggactcatcctgttaccgtatctggttttcccaggctaaaggcttagaatatactgaggtgattttagaaaactaagttttctgacctttcccaaggcctttataaacctatgggaatcattttaatgattagagtccatggggggaaatttagctttttgaattcttggtggattggcttttggataaaagaggatccaacatattgcattagatatcagtggtgaaaatcacatggaatattagcaggcaggacctgagaaaagaacataaccacgtgtagatgggaggcaatcttttaatttccaatgcatgactaaaatatcctacctttttgccatttccagagcactgaaaactcaaagttctcttattttttcaggtttctaaggattgaaaaagagatttattcaaagccatgctgattgtcatgaaggtaccttaaggtggtgtgttataagactggtttatgtagaaggacaggaaatgagaaaagtggtacttggaactgacactccaagtaggggaggcagggacggatgcaccgtctaacatccaacaacatatacaaatgctagtgaagataatgtcaatattaagtcctactatgtgtcaccatctcatcgagttcttcataacaacattataggaaagtcatgtcattcttaatttcatagacaaaaccctaaagatgagagaatttaagtaccaggccagactgtgaaggaacttgagtccaagctaagcactttatgactctcctttatgttggccaattttgttaacgtcagtggaatgcaatgtattctgagcttttgggagagtgatatcaagctttaggtgctggcctcataggctttttttgtggtagaaataaaaattaatataaaagcattttgtagggaggtataatctaatttataaatagataaaaccagtatttaaagaatgtgatgtgtgagggaaaagagaaacccctacctcaaaatatctctctcattgctcagcataagtatgtgaagttccttatttgaagatgcatttcttggagcccaagagtattttagaattttctgtaatcttgtttcttttcttctctccttccctctgtctttttgtttcttcatttctcaaacacttattgagcgtctgctgagtacgtgatatattgcttcaggtagaggatacgaaaaggaaaagcatgtccttcctagaagacacgtagagtctgatgaggagacaatagggtcagacagtcattgtgataaaacccaacgaggggagggagcatggagcaaaagagccttgaaggaggctgagaccttcagaaaagtttgtgtagaggaggtagtaatctagcagaggtctgaaggatgggtaaataggggatggacattctggacaatggggaaacctatctcaaaggccttgtggcgtgaaatgatactgtgtgagactgaagaatgctgagcttttcagtatttttaggacatgaattggaatgggaagaattgataggtgcaggatttttgtgggtcaatagagggccatattattttaacaaaggagtttaggttttatcctgcagctgatgagtaactctagtgatctatattattttagctgaaagtaattgcaaagtcatttattggcacctaggaagtccagggttgtgtctgacttaaatgatagctatatcgagttgcttctaaacttaacagtgattcttctggatcagcttcattcttaggcaaatatcacaactaaaattctaggcttatatctggcaatctctacaaaaaaaaaaaagtaacattttttgtaacatctctgcataaaaatcccagggagaattctcattgactccgcttggatcatgttccttcatctgaaccaatcactgaagccaaaggaatgtcaactttgattgacaggtcatacggtcatccctggaactggtgaagtgagctccacttaaattccatgggcatttccccaaggagatactggatagctgtgttggaagcttagtcaattactcccaggtcctgacaccctccctgcagtagaaattacaagagaataaatattctttttgtaataattttgatatggaaattgggcactgaactgtgaaactttgaggagatcataaatatgtctacgagaagaaacttaggaaaattttgatgaaagatgtgacatgattgatttggtactgcaaagcttgttatgtctttaaaaatacatcattttgccctgatacaaagaacaagtttttgccaatacaaaaaaattcaacaaaccatgacttctcaaatattgagcaaaattgattgtcttggaagatgttccatgtttctacaatgggtacacctacctattatagcagatggcataggtgctctacccagatcccctccactgggctggtgcactcatcccttggctagtgcaagtgctgtctactgaaggctatcagcagctccctcctccaagaaggttgaccagctgcatggtaccattcactctctggagctccctgtggatgaggccgaggctagacttctgaaagcatgcctttgcctgatcttttctcctgctccagcttgctccccttgcttcattgcaagttacttccttgagctcttcctccgtgtatcttttgcacaagaatccccatctgaggttgtgcttccagggaaccgacccaatacacccacctatacatttctgtgtagctcaagggcaatgagccattcttgcctaaaatatttaaaggagaacagtgagtgccaattcttttctaggaatggaagctgaaagaaagaatagaaggaagaagatgtcctctatactacctcattcctctgctgtaggccaggcctgcctgttttctctgaagttctaagtgcctgtgtgaaattctgttgcttgttctttgctgaacaaatatctattgcaatgccacattttggaattttcttgggaaagccaaggcctttgatttgtagcttttataatccatgttaccccaccctcctggagccttgggatatagacaaggaggagaacatagcactactctaacctcacagtattctccttaaactaaaaaacaaaaaacaaaaataaacccccaaactccgaagaaacagacagtcttaatacgatgcatgtggttatattttagctcaaattgaaatcagctatgcagatcccaaagatattcagattctacttctttttgtttctaaatgtgtttctattatattacagagataattgaatggaataatttgcctggttctacaagcaatttggattcttgtaatagttgccttttgattttccataaatgacatattttaaatcacagaatagctgcatgggttattacagaaagtagcaaatggtaaacagtaagacttgctgttttcctaaaagctcatgagttaggaacatgcttactttcagtcacttcatttgcttggagtcctctgatttagcttcagagttctacttccatttccctaaatgaagaaacttcgtttagagaaaattcattgaggacagggtgttggttctacatctaacccatgtttgggagtctcagtaaagtttcatggggcagtgtccagtttccctatcaacataatgactgaaaagaatatttattctgttttaatttccactgtagggagggtgtcaggagcaaggagttattggctaagcttctaacacagctaggtctacgatgggcatgattgtaagttcaaagaacctgaaaagacctgcatcttaaccaggtaccaggctgattgttaagaagggtgtggagcatgggagaaattccttgggtcttacataacaatgagatctatatatcagcaagtctgctaataaaggcttcactttatttctgggctccacctaactttgtccatctgccatttgtggttacaccctcaagcaattttcctaatgccccactccctgtggtaccacatttttttcttttgacaataattttttcttattgacactttatttttctctacccaacccaaggctagaattttatggtaattcccatctgaggccgccatattctgacatggccttagcactctttctcttagataatgtctttctattgcctaacatttcccccttcttcattccataatatttatcttgccaggtgagcttttagggagcacaaaagagaactgaaccaaatgtttggttatttccctttgacaggtagcctgaaggctactagatacttttccagaacgatgttcttaagagtttgattctgcaatgtttgcttgatttggcatgggtgttccagttgtccttcttagataaatgggaggaaatacaataatgtcagagaatgtcaggcaaatgatgtgattttattacaatagcctaagaatgattttaaagcttttggaagacaaattacagagagaaaaactttgcaataaaaaatgcagcttagcaaagtagaatcatcctccaaatattgtcatgacaagtctaaaattaaaaatagcagaaaataaagtaatcgcatagtagaaaatatagtaatcgcatctgacaacaaaataatttaacaaaacttacctggacatgacataagaagagagaagtcaggtatagtttaggtaaagataaaaatggtcatagaattggacacatgtatacagataaatttgtgtatttaatagatctgatcatatttgatagattatgtacatatcagaagttgaaacttttcatcagtctccttcacacagctttgcacactttgctttcattctgttgtgttgccctgggaattcatcgtaacttgaaaaaagtggtgtctttattcttgtttttccatggcaatgccagccaaagaagcattttcagttccctgctccatactcattcatgcaatgagttattttcacattttagaggtgcctgatttcttaggatttcttcataccttaaggttctgtttgtcattgaaatgggacaggctgtgctgacactgaaaagctggtgagttcatcctaagataatgaagtcatcgttgacccctctcatggacatctttgtgagctcatactgagttctaagtccaacttaaacaaattgtgacatatcatctaggaatatgattgtggaattacatgaccacagatactcccaaggtactgaacacattattgagtggtgttagaggactgagccaaggaaacattctggaaacttaagtagagagaggctgagagagagagagatggagagagagatgtggttcagatatccctagaaaatggaggagactctgagcagtagaaaaagctgccgaaatgcattgccatggacctgacctttgatggtaacttatttagcaaaagcagaattgtttttttgtttccatatttcatttccctccccttgaagatagaaacatgcccatttggctggaaagatgtccatattacatcctaaatcatttcctttgtaaggaatatttttgcaaaaaatccttatagtaattcccgggtatagaacaataaatgttttactataattgccttcagagtttcatagtgttttcttcctctctctcaccttcaaaattaaattcgtaatgccctcttcatgtgcttcacatatatttctgtaaaatcattaaattcaagggcctgaaaataaacaatctttaactggcatcttaagatgctcaatacaaaatgtaaatacagccatttgaattttttcaaacgtctttttgggaaggaaaaactaacatatttgatatcaagtttacaagaactactatttctcttttttctttcttcctttctttctttctttctttctttctttctttctttctttctttctttctttctttctttctttcttttctttctttctttttctttctttcttttttgagacggagtttcacacttgttgcccaggctggagtgcagtggcgatctcggctcactgcaacctccgcctcttgggttcaagggattctcctgcctcagcctcctgaatagttgggattacaggcgctcaccaccacacctggctaatttttgtatttttagtagagacagggtttgagcatgttgggcaggctggactcaaacacctgaccttaggtgatctgccagcctcggcctcccaaagtgctgggattacagcgcccagcctatttctgacttaaaatattatttttgcttttttccttggtagaatagtctgaccagtttatgcctattataatttttgaagaatatttaaggaataaggcactaaagtgaataatatgaggttgatgatgattaagcttagagaagatgtctgctcctgctgctaagatgcttgctgtatctgaagatctggaagtaataatggctttgtcatattaaattagatatccctgttcttagggacaaagtgcacacaatagaaacctgatatagccttacttgcccttgcccttgtacctgtcctttgtctgttaccttgtcctcaatgctggaaatctaaagaggagagtacactttagtggaaagactatttgaagatatcatttgggtttatgatgagtttattggataagttagggtcacatagtaaaaatcttactttcacccagaagctggcatttatggagcaagttgctaaaaagttctttaattggctgaggaattaatgtatttgctactaagatctatgggaaatatttttccaagtgtacatagaatgatgtaaactttaaatatttgcattgattatttctattgcagacgaaaaaatagcagcaacagcagcagtgacaggagcaacagtaggacggtgaccataaaattcatttgcacaaactgggatatttttgaaaatgaaagcaggtgctacatgacgaagggcagggcagccagtttaaaccagaacatttgataaccataagagtagtaatagtagaagtgtagtgataatgcataattccataatccaattggtccagtccaataaggatatagtcacacacacacacacatgcacacgcacacacacacgcatatgcatacgtgtgcacacacacacatacacactccagtgtctaaaagatatgccgttatttacaacagccaagacatggaatccacctaagtgtccatcaacagatgaatggataaagaaaatatgatatttaaaataatattccattgtgtgtatatatagtgctcagtcttttaaaaaggagatttgtcatttgtcacaacatggatgaacctggaggacattatgctaaggtaaataaatcaggcacagaaagacaaatgctttataatctcacttatataatcgtccctcggtatccatggaagattggttccagaatttcctgcagataccaaaatccatggatgctcaagtcccttatataaagatggtgtagtatttgcatataacctatacatcctcttgtataacttaagtaatccctagatttattataatacttaatagaatgtaaatgttacataagtagttgttttactgtattgttcagggaataatacaagataaaaaagtctgaacatagtcagtacagatacaaccatctttttttccaaatattttcaatctgtggttggttgaatccatggatggggaactcaggggtacagaggactgactgtatatgtaatagaaaacagttgaagtcatagaagcagagagtcgaatggtggtttccagtggggataagatggaggggaatcgagagttgttgattgaaaggtacaaaatttgaattgtgcagaatgaatgagttttggggctctaatgtacagcatggtgactatggtaaacaatggaacattgtgtacttgaaatttactaagagagtagatcttgactgttcccaccacacacacaaacaaaggtaactatgtgaagtgatggatgtgttaattagcttgcttgtggtaatcatttcacaatgcatacatatatcaaaacatcatgtcatacattgtacatatatataatttttatttgtcaactgaacctcaataaagctgaaaaaaacaaaaaattggaaataatacagttctttacttacatttcttgaattccatgaagaataaaaaaaaatactatgagaacataactacaaatctcctttttcctttcaaccaacttcaacaaatttcctcacataccagaccagatcctttctcctcaggacctcttaaagttcctaaatctgccttggcctgtacgcttctttttggttttttttcctctgctttgtttatgtttattctgcaatacataagccccaaagatctagtctggttagtccagacccttctggggaaaccagaggagaagaagaaactaagctggcaaagtgtaatcctcttagctggcaggtagtgggcaaatctgctactagtcatctattaatagccttggtcccatgccagtagcttatatcaatagagaatcttctatatgcctggtgctgtgataaaattaaaatcctcccctaaatcaattaccattgaaatggatgctcttgatagctccgttttgcaggggagaaggctgaggcttgcttgctaaggtaggagagttgctccagggatggagccaggacataaacttggcagtctgttaaggagctgatgctcttagatagcatgttcacagcaaaactttgacctgttgttagtgggattgcttaatgataataaaaacccttactctaaatgctctataataaaacatgcccagctttaagtacatggtaatcctagcaaatgttctttctgactttgaaaatcattctggtgtgaatggggtatctagaagagatctttctgataaaagagtttaatatgaaaataaatgcatatgaattcaggttctttggaatacttacacaaaagtgaacagaacacacagtgagaatgggctatttttccttcagttggaaggggctgtcattggctgagtttagctgcttttgccagaaagacatcaaccatttttaatgttctgactattttttatgactgcctgaaggatatcagatgagctatctgttgtaaatcaataataatttgctctagagtaatgaggaactaaaactgtttctaataaatctccaaatacttagcatactttaaaaaccaattgtttcatgagaattagatttcttctctgtccttaagaaagagctgagggtggagggaggcagaaacactagccaaacattttggaacagagaaatgtgaaaacagtgaatgaaggcatatgaattccaaggctttgttttgtaatctcagctgttcagaggcacgctctgtggtgcaaattggtacaacttacagcaagtcagatgccactgtgcagtttctttagaaaagctcattggctacaaactgatcatagccttcagtatcaactaagtaactagaatatattgaaaatagctgaattctagttaaatcatagcctctgcctcctggcagtgctctgtaatgactgggtaactggagcatgtcttggaatgtggagggatgggtcccactgtctgtctagtctttttttttggtatttagaatgcatcatgggaaaagaaaaatgtaagctcaatccatccattaatttgatactgttataagtatatttttcctggggactttcttatgaaattggaaggggaaaagaaatccactggggaggggagaaagagagaaatatttttttccctaactgtgtctgcatgattctgaggatatgccaaaatcttaagagtaatctagtggttaataaactgctgtagttgctattcatcagacaaaggaaagcaaatgattgcttgtagaatccctgcccccaaatctcaggcttattttgtggaaggaatgaaaatagtaaagaatactgtggcgggacaatggtgtcctctgagccgggtttcctgtctctaacagagctttccctttagcgagtttcagtgaatgtaagaatttcagtttctgggtattctaatgcaaaaagcttaatttcaataatacaattctgtataataaaatcagctaagagtctgtgggaaagatctgaccctatttttgctcttacttcatccttgggtttatattactagaccatatttctctgatagcttgatgtggtcatgtgcctgaggtctgtgcaatgcaaggtgtgcaaaagtgatgggtggtacttccaggactggcttataaagccctctcatgtgccatctcctttcccatctgactgaatgatgagggtccctaagacctaagagaggacagactcacaatcggaaggtgcccaagaccctggatgatcacatggaagcctaccccaccagaaaagtccattactggccagtgacaggcatggtaattaaagcattatcatgtcaagtccctgagatttagggattgcttttcatagcagctagccttactttattaatactggattggtttatgtcatgactagggtgatggccttgtttgatgataatgatcctgttctctatgtgaggttgtctagattctggtcctggcctctgcctgttagtttttcagcagcaaaatgtagagtttgcaccaaagcctttaagattagttagagtttagaggtttttttggttgacagaaactctgacaaacttaagccaaaggaatttgtcatgaggacacaggtggctcatggtatgaaaaatgctgttagagaaccaggctcagagagggcaagaattagggaagatccaggaatccaggaagcaagaggtacttaaaaatcttgtcgcgggctgcctctgagatttatcataagtattttctattcttgccttttggttaaattttgctatgtaaaaaaactttgtggcttaataccactaccttttaatagctcatggttttgtaggtcgaaaatttgggctggacttagctgaagttttctacagatctgggccagatcaagccaggttcactcatgcatctgccatcccctgccaggtcagtgaaggctggtccatctaagacggcccaaatggatggtttgtttttgctccatgtggtctctcaacttccatcaggtgagcaaggacttgttcacacagcaagtgagcagggatccaagaggggtgtagaagtgtgcaaggtctcatgaggcccatgctcagaaccttcacaatgtcacttctgctatattctattggcgaaagcaagttacaaggccagcccagatttaaagagtgggaaccccacctcttgatgagaggagctgccagattcatgttgcaaagtggaatagatgtggggcagtggtggagaagaatggtggccatttttgcaattcattaaaccttgcttggatcataggtttactccttgagtaggggcgggctggccaatttcatactcctcctaagagtgagctgaatgtgggagaagttagttcccataaggaaattagaatgaagcgcgagatgttctgagtaaggtaggtagatctgattttgaaacccaccatcattatctagatgtgagacctgagcaaaacacagaaactcttaggactactttgtcatctgcatgacgggttaagtaatatttactgacaaagtcgtgataattagagattataaaaggaagggacatgtaccatgtttatatataagtggcatccactaacttctcaagttttcacctcgaattgacacaaggaaatgaagggagatgtgtctattctaaacagtttttccttttggttcttttgaaaataaggcatgataactttgacactaaggctcaacctacttttgctttcacagcatttagaagtgttattcactaagatctgtctttaccattctcaggaattgggtttgctccagggctgtttcagtggccacattgtatccataagctttatccttccttattggttatgtggcagggctgtcattctgattgactggagcccatgctgcaatgattgttaaatattgtgaatatccccacgactgtatctaagaaacaccccacaaccttaacaaattttgttttcttcttctgggaagtactgtggctttgtggaacctgaggtagcatttgtttctgaaagtgtttgacaaatgtgtgttgaatgaacatttgagagtgaatgaataggtaaatgaatgatttggtgtaatgtcttagtttcctggtgacagtttaaaaaaaaaaaaagaaatgtcttgattaagtgcagacaataatctatcttggaaagctgctagaagagatatttcagggatagaattgcagatgtaaactataacaaaactgcctgtttgctttatttctctttcttcagcctgtttatcttttcagtctcaactagctcttgaaataaataatactggggtttgccatctggggtggaaagctgaattttattaatttgttctaaaactagctgttttgagctttggggattacatgcagggagtgtatctccttgtctttaaaattaagatttggtgtacaggtcaatggtagctttgccagtggaatcccaaagtgcattaggaatataggtggggattaaagcagcataactgagatcctatgctcaggaccaccatggcccccacccacacccctgccatcacacccagcacccccttgctttttgagtgttaaaaatgattttttcgccctctctgctgtatttttccacactagagggctctgggtaattttagccagtttgtccagtttgtgctgtgtcctccgctatccacttggaatctaaaagatcacaggaagaggacagagaatgactagcaaagccctcgtgaagcaactgagttttcatcaggacatagcagatgctgtgtgcaaaaaagatcccatttggaatgcctggatgatagatacactttttgattttcatgcagaaacctctaaggcattaattgggaaggggtacaaaggtagagtgaccatatcaactgtatgtactagtttgtctgggacattcagctctacatcttttgtcctgttatctatccaggttagcatttgtccaagatatttccccttaagtgaaaaattattatcagtatttgtgttaaaataacctgggatagacttggaagacctctgcattgtgctttcacttcttccatgaccttgcctaaaagtgagtgagacgcacatgaaataaacagagttttcatttcaacaagtggtcaaatctgaaaagaaacagagatgatccatttttctcttcctaactctttccagatgcatcaaaatcaacatatccctttcaagggaagcatgcattgtgtagtcaggcagaagtagctactgttgggtaactttttctggatatagtggtgggagaagagctcaaggctctgtccctattggacattcagtttccaaccagttatgccatggttctcctgaggctgactgtatgatgctcgcaaggcatgcttcaaagagattagttaaggtggctccattaatgggttgaatggttttttttctcacctagttcatggaatttaagtaaaggttttagaagttcactctgacaaagaaaaactatatttttgtaaatgagcttcttgctcaaaatcagttgggaatatttaaatcaaagtattcaatggactaagtgtcaagaagtcagcagttgaaactcttagggacctgcaattgttgacaacaaagcttgcaggcaggaagatattcaaatttatttctacacaatatacatattaaacagtgaaagctcaaatggcgtgtacaatttccatttgaaagtctataattatgctatggaaaaactcaccttgtggtaagaaactattgatagacctcctgtttttaacagaataaagttgcattgcatatactgaaataaaataaaattgagaaggtctgtgattctgttacatttatgtttagcgaaacattcaaaagtatcataaagttttttttgataagttttgcttgtaaaatatttgcctaatacaagcactctgaggacaggcaaaaagtcagtacatatacagtacatattttagggctgaaacaacatttttatattttagtaaagaataatagcattgctatggattgagttgtgtgttccccagatttatattttgaagctctaccccacagtgtcactgtatttagagatagaacttttcggaggtaataaaagttaaatgaggtcataagagtggagctctgacccaaaggaagggagctttctcttcctctctccctttggacacagcaagaagtggctgtctataaaccagaaagagagccttcatgagaaactgaatccactagcaccttgatcttggacttctcagtctctagaattataagaaataatacccaatctgtggtgttttgttatataagcttgaactgacttgtacaatattcatttagcaaaacttactgtgagcttggtaggtatcacagccaatgtcaagggatattttttctttaaaacaatagagaaattcacatactttaatcatgcgattttgaaaagatctcaggtattttataaaaataagaaaaataataagataatattgaagacatattaccaggttggtaggtatcacagccaatgtcaagggatattttttctttaaaacaatagagaaattcacatactttaatcatgtgattttgaaaagatctcaggcattttataaaaataagaaaaataataatattgaagacatattaaaataccagtaatatggtatgagtcccatgtggctaaaaaaaccccaattaatatatataaatatataccaagaaaaactgttttgcttacgttatttttaatgttcatataataaacattgtatttaaaataattttaatatatatggatatattctatgttgattaaaaaatattatttttcaaaaatagttttgactagaactattttatagttccaccaacaaattaaaatcaataattaatttttaaaatttcaaaatatcatttagatttattaccactcttaaccactttgtttctctcttaaaattgttctaggttggaccatatattatgggagcaccttttgcaaggatgaaatactccgtctgggtaaggcattttcattgaagcttgtagctgtttgtttagttatttaaatcaggttgatggatgtaaagtgagctccttctactcacctgaagcagaaacagtgctaggtgatactcaaatctctgggcacccaagaagactccaaatctcagcatctcttgaaataggtggcaatgtgtaacagcattctagccaatgtaacatattttacgtccaggactggcccctaaaacattttgcatgatccttcaacattcttttttcctttcctactagatggatgggaataattcagctggggatttggaggccctaaagggcagtgtagccaatggacaggtgatcccaggtacctgcatgagtggaggcaggcccttcctgcagacctgcactgaactataacgtgggcagtaagtaactatactttgtgttaagccactatgatgtggggctgtttgttacaactgcaaagattgctgtccttgattaatgcaccatgcaatgttctcccaggcttagtttctctgcttgattgctctcttcatgttcaactcttatatgagttggtgacactttggttgaaacatttccaaggactgaagaatatgtttattatcaaaccaactgattatgaaaataatctgtatttttaaggtatgtgaaggagtaggtatacatttgtgctttgggccaattttatatctttaaaataaaaatacattaaataagcaggtaatattaataattaataataccatataatgatctgtaaagcatatattgatatgtaaaacactgtgctaagtacacatatataagcacaactcttatagcaatgctttgaggtaaatgctttattaactccattttacagatgaggacactgaggcttaaagagcttaaataacttactaaaagttacatatgtggaaatagtggaatggagcttggagtcaaagcatactaggctctaaaacttgggctctcaatcactttattaaccataatagagacattaattctcagtccttagacctcttaagtctcaccatgattcatgatgataattatcagtgatgattgacatttctgtatactcactcactactgctctgtgctctgtgctgtatgtgagatagcttattaaaagtcttcacaatcatcatatgagacaggcatattactgtctgttatatgtatacctagtgtatctagtagttacagtaagcactccataaatataaatcaatcttcagcttacagaagagaaagctgcaatttagagactaaattactgactatagcacctgtgggaatgttcttttaaaaaaagtgacttgggtgtcatgagtctttccatttcagtttttacagattgcatcccttctcttctaaagaaaaaaaattaaaaagggggaaagtagtgtgacttctctaggttaaagcgacccctaagttaaagaggaatgaagaaatttacatttcataagctgagagttcccattgagagttccgtctctccacttcccacctccaacacatatacacacacacctttgtattactttaatacttttgtgaatcaacagagaacccaattttgctaaaatcaaggtggcacaatttagcttcctgagactggtcgtagtcagccttcacattaactttgagcagggagggaaaaagcagcagacacgaggactgagaggctctagctacatagtctggctcaggcttctctaccgtgaaaaatgatgggaaaaagaaaaagaaaaagaagcagaaaaacaaaacccgagacagaaggtaggaggagacactggggcagctccagctttcagcaagccggctctgttccacttccttttgattgtccaggaaagctaagaaaagtaaaaacaaggctgtgactccgtggaagcagccctgtggaaacgttatgttaaacaattggcctgtgggtcaattgtgaagggcgttaatgtgcgagaccccgataaagagatttgcacgaatggccacaaagcatttcatatttaaatatggatccaagtttcttctgcacaacagtataaatataactaaggtggggtggagaaggagatttggaaatcagccgatttgaaggaagccaacacaaacactccaacaaatgcagcatttcgcacagcctttgtgctcattgcttgttgttggcatgaactcataaaaacagaaaaaggccatgaagggtagtggttgagatattgcatgccctggtggtaatgaaatacactgtttatctgaaaacaaccttcatgtcagtgtgctttgcatttcctgaaggtgatagtctattttattttgtttcttgatggtagtaaaagtctagaaaaacgtacaatttttcagaagggccttaatttattttctgtggttatctcattgtgagataagtaagaagagcgtaagtccccaatcttgaaaactttttttaaactagttgtttaatataagaatatattttagcctctttagcaaattcatactgcacgaaaggatattctataatagactaagcaggccatataaaattagtaaagttggatgtggtgcctgaaaatatttggcagaattccctggaaagccacatgtgaacatttttaatatatattatgaggcagaaaagaataattatcttcaattgaagttcccagtgaaagaaatgtatttgtacagtcctttcaaagaaaaccctcagtattgacaaattgtgtttgggatggtggcttctctgctgtggcttgtggcttgcttctcatagaaaaagcagacattactctgctatttcatgtgacttctaccttgagcaaggtgtttttgccaagggctttggaacattggctgagaaatctccagaacaaatacttttgaaccctatgggtgtgatactgtggagagggcagggcatcaaaactaccttgagtgactatttctcaactttatttctaacctgggctcttggtttgggataaattgcacatctcctttctttacttccttctctggagagggtcacttttcactcagggcacccatatgtgtctaaaacattgcatttttgaggccagcctgtgttttagtgtgggttgccacaaacacagatcctgataataatttggtgtaagaagattatttgggagtggatcccaggaagcatattgaaggagtgggaaaagtgagagagcaaatagagaaagccaataaggggttgcaaagaaacgattgactccttaaggctcagtcctggtggacccctctgggccactgtgcaaaacacaactgaaaattatccattgtgggatagagcagctcaggcacttagccaccaactctggtcccttttgtgtagagggctgctcctgagttgttaaccttctagctgagacttttcagcctgccttaggttgatagagcatcctcccataacctaagacgagccttggacagactgagacagagagaaatggtcaatctgaacaggaactccttgcaggctctcttggccacgtgaattttggtaggaacctgggagcatcagatataaccaccatctctgaccgttaaggcagcctcctggccaaggccaaagcccttatttttgataagcgcccaatattttttcacttttttcctttccttcatgtaactcttcccagtgttttggaataactaggtaactatagcctttaatttccttaatttctaagagaagtaataattatagaatttatcatttattgagtgctcaccctatgtcaaatgcattgacttatttaattcttacaacaaccctatgatataggcattcttatccaggttttgccaacaagaaaacaggctcagagaggttacatttcccaaaggacagggtcaggatttgaacccaggttcatctcaattcaaagtccaagatttaactatgaaaactcaacattgccaccaccaaattgggataagctgtatttccagctatatacaggatattctgggtgggtataatgactgatatggtagccagcctccaagatggtctttcctggtcctaatctcctgatactctaaccattgtacaatcctctcttacagtacagggctggcctgagtgatcaatagaatactgtagacgcaacaacatgtggcttctgaggaagcattgtagcctcttggtttgttcatgctgtggaagccagctgccatgtcaagaggatgctcaagcagccatgtggaaaggcccgtatggtaaggatctaaggactcctgccggccccagcactaacctgccaacaatgcagcaagttacctggaagtaaattctctagctcccagccaaatctttagatgactgtatttccaggtaacatctacaaaacattgctgagagaaattaagaaagatctgaacaaatggtaatatataccacgtttatggttttggaagactcaataatgtaaaatatctattaaatatcccccaaattgttctaatttaatcagaataccagcaggctcttcactagaaatttaaaaactaagatttggatggaaaagcaaaagacctagaatagccaaaagaatcttgacaaggaacaaaattgcaggactttccctattgatttgaaaatttattctgaagttacaataagtgacattgtagtattgttgtaaaggcaggcatgccaatcaattgaatggaatagagagtctagaaatgggcccatgtgtatacagtcaattgatttttgacaaagtgactacataatttaggggaaaaagaatagattttacaacaaatccttctggaacaactgaatatcttcatagaaaaaaatggacattaaacctcatctcatgacacatataacaactaactcaaattggattctagacctaaacataaaagctaaaaatgtaaaactaaacatataagctaaaaatataaaacttctgcaaggagctataggagaaagtcttcacaacattgggatgggcaaagatttcttagacataactcaaaagcactaattttaaaagaaaaaaatgattactgtatgtgatcaaaactaaaacctctgcttttcaaaatatgttattaagaaaatgcctcataattctcttaagagaaaatatttgcaataatatgtctgatgaagaacttttatcaaaatatataaataacccttaaattcaataataaaatgacagacaacccaatacaaaaatagacacttcaaaaaagagattataggagtggttaatggtatggactaaatatctatgtccttcaaaaatttatatgttgaagccctaaccctcagtgtgactgtatttggagatggagctcttaggaggtaattaggattaggcaaggtcatgagggtagggccttggtttgatgggacaaacccttataacaggaggcactagagaacgcttctctctcctctgtctctctctctctctctgtctttctctactatgtgaagacacagcaagagagtggccaactgcaagccaggaagaaaccttcagcagatcccaaccatgctagtaccctgatccagacattcagccttcagaactgtaaaaagtagaataaaattctgttgtttaagccatccagcctatggtattttgttatggcagcccaagctgagtgatttagccagtaagcccatgaaaagatggtcaatgttgttagtcatgaaggaaacgcaaattaaaaacataatgaggtatcaatatatatacatacatcagaacagtaaatttttaaaaattgaaaataccaagtttcaacatggatctggagcaactggatatctcatatattgttgatatgagtgtaaaattgtgcagctctttaggaaaacagtttaagagtttattataaatttaaattatccatttaacccatgatccagcaattcttctcttggatatttccccaagataaattaaaacttaagttcacagaaaagatttgtatacccacagtggaatactattcagtcataaaatgaatgaaatcatgtcttttgcagcaacatgaatggaactggaggccattatcttaagtgaaacaagtcagacaaagacaaatatcccatcttctcactcataagtgggagctaaaaaatgtgtacacgcggacatagagtggaatgatagacaatggagacttggaagggtgagggggtggtaggggattggatgacgagaaattacttagtaggtgtaatgtatgctctctgggcgatgaatactctaaacgccctgacttgaccactatgtaatctgtgtatgtaaaaaaatgccgggccgggcgtggtggctcacatctgtaattccagcactttgggaagccgaggcgggtgcgtcacgaggtcaagagatggagaccatcctggccaacatggtgaaaccccatctgtaataaaaataaaaaaaaatttagctgggcatggtggcacgcgcctgtagccccaactactcgggaggctgaggcaggagaattgtttgaacctcggaggcagaggttgcagtaagctgagattgagccactgcaccctccagcctgggcaacagagtgagactccatctcaaaaaaaaaaaaaaaaaaaaaaagaaagaaagaaaaagaaaagaaagaaaaaaaatgcccttgtattccataaatttatacaaaccaaacaatttgtttacatttatggtggctttatttgtaatagtcaagcactgaaaacaaactaaaataatggatacagaaatttcctctggatgagggaatacaactcagaaatcaaaaaaaggaacttctgatacgtgcagtaatacagatggatcagtcaggcattatacgagggaaggaaaccatacagaaaatagtatgtgctgcacactccatttaattgaaattccagtatatgcaaaattaatctacagtgatggaagtcagatctgttttttcctggagccaagagccggctgaccacaaaggaaaatgagataactttctggaatgatggaaatattttgtatcttgattgaggtaggctgttacacaggtgtgcatatttatcaaaaatgcaaaatgtgcattttattatatgtaatttgcactccagttaggtgtatgaaaaaccaacaatgagaatgattggatcatggatgtttgttatagtatcccagtatttttctgtatttttaaaagaataatttttccttaaaaggtgcctgcctggagtttactgacaggtttatctcttaccctcatatttcaccctccttttttgttgctttagaaaataatcaacttgaatttggatgtatgagtgaaagagcgactttaaaaaaaatcatttggagcccattcatttttggttacatagtgatttttggcttgcagagttcatagatttatattgttgtaggctgtctcagaagtttttccaaaatgcatctaagagtgcaggatatttgtgtgtgggtgaagcttgggattttttttttttttttatctttctccttgagaaaaggtttttgaaatgtctaattaagtcctggaatgaattcttgctaagccaagcccatgggaaaacatggctgggactggcagtttcctcatccagccacaactccaggacccaggttttccttcttcaaagataaaacagtagcccttcttccttctgcattcaccacttttttttggttttctttttgagatggagtttcactcttgttgcacaggctagagagtgcgatggtgcaatcttggctcactgcaacctccgcctcccgggttcaagagattctcctgtctcagcctcctgagtagctgggattacaggtgcccactaccatgcctggctaattttttttttgtatttttagtagagacggggtttcaccatgttgaccaggctggccaggctggtctagaactcctgaattcaggtaactcaggagatccacctgtctcagcctcccaaattgctgggattacaggtgtgagccaccacacccggcctcatcactcttaaactcccagttgaactactttttgtttcttgatataaaagtccttaacacctagtgagaagatcaaacctttgtgggtcaaatcttcaatgaaagtcagaaaaccttaatcatctcattcattttatggtacctggaagtagaaattgttccttctagacaggaacgttgcctgtcttgttcattgtggtatccctatcacctagaaccacgtttaataaacatacattttactgatgaagaaatagatgcccagagagatttaaatgcatagcctaaaatcatacagcccatgacccaataattctacttctgaatatatatacaacataattaagaatagggtctcagggagatatttgtacactcatgttcatagcagcattattcacgacagccgaaatgtggaagcaacctaaatgcccatcaatagatgaatagattgacaaaatatagtgtatgaaaacaatggaatattacgcagccttaaaaaggaagaaaattctgacatatgctacaacacagataaaacttgaggacatgatgctaagtgaaataagccagtcacaaaaggtcaaatactacatgattctccttatatgagaaacctatagtagtcaaactcatggagacagaaaatagaatagtggttgccagggactggagagaggaaaaatagggggttgtttaatggatatagagttttaattttgtagataaaaagagttctagagatggaaggtggtgatggttgcacaaaaatgtgagtgtaattaataccactgaactatacggttaaaaatagttaagatggtaaattttgggttacgtgtattttgctgcaattttaaaaagtcacacagctaacgcatgacaagagtgatggaacctgatgtggtctgaatgtttgtgtccctccaaaattaaatgttgaaaccaatcaccaatgtgatagtatttggaggtggggcttttcggaagtggttaggtcatgagggcagagccctcatgaatgggattaatgccctctttgtcccttccactgtgtgaggacacagcaagaaagcaccatctatgagtcagaaagtgggccctcaccaggcacgaaatctgctgacgccttgatcttgggcttcccagtcttcagaagtctgagcaacacatctctgttgtttataagctacccagtttatgttatttcctcgcagtggcctaaacagaccaagacagaacccaaacccatgtcttctggatttcaagatcaaaattatattttttacagccatgtacaattttggatactgtgaggcaggtttctccctagcttacttgttatagaggaagatcatgaatttgattacttaatactatgacttcagagatttagggatagctctgccactcatgaaaagaagcttcttaatttgcttgatgttgcctgatgtttcactaagttagtgattctcattcttggcagcacattggaatcaccagagaagatttaagaaatactgatgcctaggttctgcctctcccaaccccaggcattctgatgtaatctaactggggtgtgaactgggcattgggattcttaaaagccccatgcccaaatgcagccaagaatggcttctctattaggaggcagatgtctggattccttacagaacagggtacctctgtgcaacagaactctaaacgtttctcagatcacaagcactaagccaaattgtggtcataggcaacttatgctcagctccagaggaaagtttaccagctcctttcccaaactttcgagagggaggaggagttaacataaaatgtgttaacataacgtgtctttaaagtaagaacctgaagtttggctgctgggattggaattctgactgcatcacctgctatccatgtgacttcagcctaattgcttaacctctctgaatccccaaatggacatgatatggtttcttgcccacagaattacttgagaaacagataattcctctaaagcacaatatctaacagaggctgaaaacttagttttactacttattataaagaactcatattcttgatgtctggtattatttttttccactatttcatgatgagacaaatttctcttacatgatatttaggtctattctgcatggcatgtgctgccctgtgtttctgaagatcaaggggagaggagggaaaaatgcagggagagagattggtaaagggaggggtgtgtgtgtgtgtgtgtgtgtgtgtgtgtatgaaaatggagaaaatagagcaagagagaatggtcagattaccaaaggcatttactaaaagatggcaactggagaaaattttgtgacctctgaacttgataccagacggaaatggaagcttcaagaagagaccaggaagcgaagatctgaagcatccttagaagggagagggctgccatccagggatggaaagaaccttggcaaaagaggtggagagaagaagaaagaatgagccttggaatcaaccaggaggaaagaaaattcagagaaacaccgtgaaggccaacacttcaaagatttatgtttttatgctgctacatgaaaagttaaacttggaagaaaagaatgttctgaatcatttctgcaaaggaaaaagccatcttggaactgtacataggagctaaagcaaatggaggctgtgtgatgatgaatccaaattcaccacatcttcttccagacttgagggctgcctgggcccctgtgcctaccactccccgcaacccatgctaatgtcataccctttgcagtggggaggaaagactgccttgacccagttgcagagagctcagaggagggaggcacctgcccaagggaatgagctcagatcctctgataatggtgcagctggaggcctggcggaggtccatgagggtcaccatcaagggcttttgtcgtgctgaagggtgtgttgtccaagcacctcgggtgggtgctgagaatattcataactcattcccgattgtgttcattccatttgctgactaattattttgagacttagtcagagggaagggttttggctgttcccttctgtgcacaaaacatgagcctccactctcactagctgggagagtcagcccttttctccatcatcaggcaggtttacaaatctctgctgtaagactggccacccctctgtccaaccttccactccctcaaagttccttggtgcccttgctagaataggcctgagtgcacagtgtgcagagatctctagggattcttccatcctcttctctcccttctcagcatggcaccccatacaggggtaagaaagggagttcgggctccttcagtttccatcctatccaacaacttggtggctcccaattagattagctcagagaaaagaaaacctccaaggagttcccacaagccaagggctgggccccgtccctggtgccactgggtcacctagcctgcactttttttgagtgtgtgtgtgtgtgtgtttaatatgacagttcaggcttgaaaaccagtacgtttggaaatataaactagatgaaaacaagctataatgaaagtgaaaaaaaaagatatcagtttactgttgattgaaaatcaggaccagatgagattgggaggctccgggcatttaatttgctagaggaggtcacttcttggagaaaaccaggcccaggctacattggcttcccatcagcaatattgtgtttgtttatttgtgcccttccctggtttgtggagggaaataatgagccagctggttttcagttctttctgcctttctatatcatggagtgtttcatttcatttcattctgtttggaaaggtgggtggataggaaagaacatcagcatgactagtaacccaagagtccagtttgtttcctaaaaagcatgggatgctcgagagggaaagagaggtgtcaggaagcaggaaggatgctcaagcatcagtcaagcgaattaacaaatccattacctcaggttgcctttttctttttgtggtaacaacataaaatctactataaaatctacccctttagcaagttttcagtgtataatacaatattattaactatagtcctcaaggacaaagaaattttggtatgtatatgcaatggaatattattagaccttaagaaagaatatcctgccatttgcaacaatatggatgaagctggtggacattatttatatgttctttttagcatcagcacaaaaacactatcacataacacaattaatattaattctttagcatcatcgaatatgcagttggtgttcagttttccttgattgtctcaaaaatgtcttttacagttggctttccaatcagaatccaaataaagtccatatatctttaattttctataaagacatttaatatttttattacttaatttgtttattgttttgttaattagtttgttaatcatctgtatgcaccctttaaagccccatgaaaatggaagttacctgagtgctacccagtctctgtcaatttcgtacatcagagtctcccagcacctggtgtagcactcaggtgctagatcctcggtaagtatctactgaaagaataaataatgaatgaaaggacaaatatgtttgtatatcacttgtgtatatttaaaacctcccttttgggccccataatgcataggactcctgacttgattcttttcttcttgctcaagaaaaatgaaaaaaatgtgaaaactgagctaaaagttatgaaattatcttgaagtagtcctcagaaaactatgctaactagtaacatgttctaacaagactgagtgataaatatacaaagacaaccttttttttgttaggtgaattaaaaaaggttgaatcagctttatttagagtaatttatgaagtaaaagcagactaaaaatgtgtttacttttaaaatctctaattctatcagcacctatcaaaagaatttcagattcttttgagcaggacttcaatttaattcatataaaattatgtaacgggaatgtttttatccattgtcacaaatattacaggagttataattcaatcttttaatgaattactactttgaaatagcaggtagctgaaaagacaatctgtagggatatgaggaagtgtccatgaaatttcaaggttacatatcctactatcattccagaaatagtatgcttgcagtttattttttgtaaattcaagaaaatcttacaaaattcttatgagactgagtgattcaaaacctctttcctttcaggctcatgcaaaattctcacaggtgatctaaaaatgcaaattttgattcatgggacaagtagaatccttcagatcttgtagttggcttgagtgctagcatatggcctatagtattaaggcgaaatggagaaaaaagcgtgaaaagacaaaagacaatttatgcgagcctcaggacgaaacttggaaaaaaactcagtttctaccttcttaattcaaacagccattaaaagactaatgactacataatatagcattaaaatatccatgcacaaacacacacatttttcattattttacccacattatgcatgtgacctctgtacataaaatataaaagaatgtcagaaatagcaaagttgccaaggttacacagagactgctattttagatgatctaaaaaattttaatgatcgcacacatagatctgagagatgcagaggcacacagctgtagccttagaacccagctttatttaccatctgtctgttagcaccatgaatcttggctgagagctgctctgcagatctgagaattctgtcttcttttccaagcactctgggctgagtttttcaggggattaatggaacctagaagtaatgtttccctgctcccaaacttggggcaaaacaagggcaggttattaacttcaaggcaggttattaacttagttatgggctcttcatatgcttttgcttgtaactgtgtggcagactagacatttagtcacttaccttctgtaagggaagtcacttaatgtagatgctcaaggaatcccacgtccaaatacggtcattgctgaatttgatgggagaaaaaaaggactgtatttttgctggctaatgcggcatttctggatgttcattaagctgttaaaaaatgtgaaatgatgactcactgtgaagccttcccaacccccttccctgctccaatttgcctgcggcttgaaggaatgtatactgacttgagttaaagaagaaacttgtggtttccattatagtctgtaaacatcgattgctgaaagcctcaagtgtgctatcatctcctgccacacacatgctttatatacagttcatcttggaaaacagattgggagagcaccgtgtttacaactccagagtaacccaactaatggggggctggtctgcctgggggtctcgagaccatcactgttaacagtggaggtcccctctgatgtcttttaagccaaagtatcaagagagaagccaaagacaagcctcattaaagaaagatcttcctggtacccacagtggttctttgctgctttatcatcagcaaaagagacataaaaaaatctttgcttctcttttaggttgtatccttaggccttattcttgatgtcattgaaaagttggtttatctattatttccaaggccactggcaatgctatcatttttgattaatgattagtttatggctaagtagtattccatggttaggtgatggttatattgaaagcccagatttcagcactatgtaatatagccatgtaacaaaattgcatttgtaccccctaaatctatttttaaaaagtttaatttaattatgcaggagtggcagcagaatgcaaaccatccagggaattattctggtagtgcctgatggatttaaataataccaagagaaagactgcagagggtatcctgagatttgcatgacatcctgaccagggttgataagaagagctaaatggataagtttcttctggaaggagatatcatggatgtggtatgggtagaaaaagtacaagatgcagcatcagaggattcgaatgtgccttctggctttgacattcagtggctttgtgacctagggcactgcttcttagacattaacatgggtacatatcacctggggggtttgttaaatgcagattctgattcagtaggtgtgggtggggcctaaggctgcccaccctggtcatcttgcacctggctgtgagaaatagagaacctggcaaggctcctaacccacgtaagtctcagtttcttctttaataacacggggtttagaatgatgccaaccttccagggttattgggactcatggcactggtaagagttcctggcacaggcactggcatggagaagacaagtattggatattggctttgggatcccagaatcttagtgattagtgatggaaaacatctgaggaaggacctagttttaacccctcatttcacaggtgaagaaagcaaggtgtgtgtatgggctcagtaagacatgacaactgtgcctgctctttgagtctaaatagaggtccagtggacagaggtgtctggtttgtatttatggtgggtgtgacttgagtctctggcaacatctgacctatgatttgatataaaatgaatcattgttgcaaatgtttcacttccctgctctttctccacccccctttatttatttatttattttaataaacgaaggcagtcctatgacaggccatgctaatatcttttattccaaacagaatgggctaggagtcagtgatttcatgcatatggagctaaaagtgtttgcttttccctgatgtctcccttcccacccctcctgactctgagctttcacaatcctttcctcagctcttaagaatgctaggcaggctagctgtcatcctcaatcaaataacatgatcagtaaacactataaaattatacctttctgctttgcagtagtggagaaggtactaatgatgcaatgaaagctaattaaaaactcataaatctcacagtcttttgagtttggtgagtggctaagaagaaagggttgattccacagcctgcttactaagaactcaatggtccttattaggaagtagctctcactgtctgcttctctttactgagacttgtacagttgttgaaagaactgccacatggctcagctttgaagagggccatgcttactaggtttcccagtttttagtcttgtatttgctataactcactgtcagctgtcagagccagttgtctatgagtatgatgctaatgatgttggaggcttcaccccagacatgtgtgtaggactccatacaaaaagacagtttattctctgacctaagaccgcacagctcatgatggcctaatttccttgaacataaggaggtccaggagagagagcagatggctggcttgatggaccctgaaacctctgctgggcagaaagaagacccatgtgctgggaaacatgggtcagttacctcatcatagtttataaagggtagcccacagcagtagatgaagggaaatagggagatggtgtgttcttcaagggatggcagagggagatatatgggtttagggcaagccataggattgaataatagagatggctggggataatgggaccccaaacctgaatatgaatagtagtatcttcacttcctggttattgtttcaggagggcaattactaactttacctggtctgaagtcctacctgaccaatatatagatcttaaggcaccatctgaggacttctagactctgagggtcctaagcatatgactgctggtgagtgataaaaatgtaggaagtcagtaagtctgactgtagaggccccattgctttgtagaaacaatgattagcaaccagcagagtggatgtggaagattgcaaaaatggcccgaattattcacccttcctgtttgttctcccatctcttgaatctgagctggccttatgagttgctttggccaaaagtctagtgaaagtgatagtgtgacatgtctaagccaaggatacaagaagccttgaacacttccacttgttctccgggactcctgtgaccatcatgtaaacttcctgcaggaagatgaatcatggagaatagccatcccagttaagtccatcatagactactcaggccccagtaggtctatcctgcaatggggcagatatgtgagcaagtcccgtgaagatcagtttagcccatccaagagcagaggaactcatatatttgtgaactaaataaattcttggtttttctttcaacatttcttaatgagaaatttcaaacatacagaaaaattaaaagaattgtagagtgaacaaccatatacctaatattttactgtttatttttttaaatcacatatccatccatccaccaccatccttcctttcatctatcaatccatttccttttttcatggtgatcattgttttaagctactaaatttggggatgatttgttatacaagaattatttttggtagtaggtaactgataccaatgacataatataaaagaaagcttattttgggaaataagtgaagattccaagaatgaagtggctgatttgggcttctttgcataacagtgttttcttactaaagggtactgatgagatctacttttctgggaggaagaattttgaccagaagttgtgaaatggctcagggtttatctgcaagcagaggacccttaccagactatattacttccctgtgctttgtgactccccagcaggtaggaatgctcatgactttttgactggaagagtagatacttagaaagcagctgtccatggggatgagggggaggaatgtcccttacgtatgcattcacttccatggcttctaagtgcttcacacaggtatatgctcatttttacatcagtctcatgaggaaaatgtcttatagatttggaaatcagatctcagagaggtttttcatctgcccaatgtcagtttaaggtcgatctaagactcaaacccaggcttgtacattttacattccaatgctctttccatactaaactctgctttttcgttgtcatacaaaaaaaaaagaagaagaagaagaagaagaagaagaagcatggcaagtgaaattcggaataagaaagatgaaaaaagagaaaagaggcattggggatacatgccaagtgatcgatttattctaaacttgttcctgtcaagaaatatttatctcagctatttccaaatgtctggcactgtgctgggtttgttgactggcatgagttgtggaaaccagctttgtcctgagaaacttgctgtcgaagttgatgtgaaaagacacagggcaaatgactctggtattggcatctcagactcccagctcacctctgatttcagcccacatgagggggacagttccatgaactaaaggctcaactccagctgtcagcttctcatttcaagggtatgctgagtggctttctcttttctgtcccagggctttctgccaagccatggcaacttgagctcatttggcttttaagtgccactcagaagacctgtggaatcaataccctaggaggtgatgctcaaccagtgagggatgagatctggtgagtagatactccggcggcctaccttttactctgacaattctgggaggtatttgcctgcttcttagtgtatctcatagaactgagccttggtgtctacagcagcaaccttgataatgcattcttgtgttagcttttcctccctccctatctcattctctctgttctctgtctcctgattccaaggccttttccccaaaaagccaactaagttcacatcttgtttcaggttctgctttcccacagctaagacagaaaaaacaaaacatattcttacaaataaaatcatgaataatatggtaatacaatattatgagacagtaggacatgaaggacagatacatatgtatacacaccatatataacagctaatacagggatttaagaaacaagaaaacgctaaaaacactggggtcgctggagtcaagcctttaagtgagaatatgatttcaatacattgttaaacggaattctgggcatgggaatctgtgggagggaatttttctgggattcttacaaacctctgtttttttatgctttactaaatgtcagccattaacagtgctgaagtatctagtggaaactttaatcaccaagtgcccaccatgaaataatgactcgctgactgccaatgctatgtgaaacccaagttgttttcatttttttctatctttgattgtgacacaattttattagggttgaccccttatattttagaaatgatcatatagctccattccacggtaggatatttaggagcacattcaatgccaaaattactaaattatatagagtcctagggacaagtgggttgggaaagccagggctgggttgtgatcgaacttgtcgttcaaagagaagtgcaaatgccatgtggcttttaaattaaaaccagatggcaaacagtatttggtaggtcttggttcttccccagttgtctaatgctcagaagtctgaagataagtggagatatttttgccacagtgaaattctggcatttgtagccacttgccttgatttccatcatgaaaggctcgttttgaagcatgactcacagaggaggccgtgaggaaaagctccaatgagagggtggtccccttgggtcagcgattaggctagagaaagggcagggtggggcgatttgggctgcagcttcctatatagtgctggatattgttttaagcagacagccttattttgtaggactaatttctctcttgctcttcatcagcccagtgcttgaaaggcaagaaagtcacagaggaaaagaaagaggaaattcataagggaaagaaaatatctgcatatcacagaaagcataaacaaaatgtaaaactttaataataggcacccataggcagatgaaagcagatgaagtgaaatctcctccaccacctcccaagttaccacatctgcacaactatctgttgaaaacactttaaaagctccaaacattaactattttgttgttttcaaagtttataaccttttccccttttgctcagctgtgttctaatgacttttttttttctgttaaagagcattggtttatgagaacaggatgtttgtattaaatattaaatcctcaaggcttccttcagctgaaggtcccagcttggcttcagttttgattgaaatagacaaacctatgttcctacagaactacagagagtacaaagagtttgtcaaatcttgatagtggaacccggcattgggccaagaacaggataattggttaaagtctgcatagttctttgaagatgcaaagtactgtgtaattctaagtcatattgaaagttgagccagcccttgagggcctgattctaggggacagcagactatacacctccccgatggtcttttgaggagcaaagttattgtctcgtgtagatgaactggactcttcatgggagccatctgggttctagaaattggcctccagctctggggtatctaatcttactccttcttggagacttaattacaggctcagtgtcatctttggctttcagggctctgcaatgtcctggaaggtatcctatagttcacatgaaaacattctgggtgtaagaggtagaactctgagaaaacagtcaaatattatatatcttaggatttccaactagtctctgataaaacagacttcaaaccaacaaagacaaaaaaaaaaaaagacaaagaagggcattacataatggtaaagggatcaatgcaacaagaagagctaactatcctaaatgtatatgcacccaatacaggagcactcagattcataaagcaagttcttagagatgtacaaagagacttagactctcacacaataagagtggtatactttaacacaccactgtcagtattagacagatcaatgcgacagataattaataaggatattcaggacttgaactcagctctggaccaagtggacctagtagacatctacagaactgtccactccaaatcaacagaatatacattcttctcaataccacatcacacttactataaaattgaccacataatccaaagtaaaacactcctcagcaaatgcaaaggagcagaaattataacaaacactctcttagaccacagtgccatcaaattagaattcaggattaagaaactcactcaaaactgcacaactacatgaaaactgaacagcctgctcctgaatgactagtgagtaaataacaaaactaaggcagaaataagtaagttctttgaaacccgtgagaacaaagatacaacgtaccagaatctctgggacacaggtaaagcagtattcagagggaaatttatggcactaaatgcccacatgagaaagtgggaaagatctgaaaccaacaccctaagatcacaatgaaaagaactagagaagcaagaccaaacaaattcaaaagcaagcagaagacatgaaataactaatatcagagcagaactgaaggagatagagacacgaaaaacccttcaaaaatcaataagtccaggagctggcttttttgaaaagattaacaaaatagatagactgctagccagactaataaagaagaaaagagagaagaatcaaatagacacaataaaaaatgataaaggggatatcaccactgattccacagaaatacaaactaccatcggagaatagtataaacacctgtatgcaaataaactagaagacctagaagaaatgaatacattccgggatacatacaccctccaaagactaaaccaggaagaattcgaatccctgaatagaccaatagcaagttctgaaattgaggcagtaattaatagcctaccaaccaaaaaaaaaagcccaggaccagacagcttcacagccaaattctaccaaaggtacaaaaaggagctggttccattccttctgaaactattccaaacaatagaaaaagagagaatcctccctaactcattttatgaggccagcatcatcctgataccaaaacctggcaaagacacaacacaaaaagaaaatttctttttccaatattcctgatgaacatctatgtgaaaatcctcaataaaatactcgcaaaccgaatccagcagaacatcaaaaagcttatccaccatgatcaagttaggttcatccctgaaacccaaggctagttcaatatacataaatcaagaaacataatccattacataagcagaaccaatgacaaaaaccacatggttatctcagcagatgcagaaaaggccttcgataaaattcaacatccactcatgctaaaaacactcaataaactaggtattgatggaacatatctcaaaataattagagctacttatgacaaacccacagccattatcgtatggaataggcaaaaactggaagcattccctttgaaaaccggcacaagacaaggatgccctctctcaccactcctaagtcctggccagggcaatcaggcaagagaaagaaataaagagtattcaaataggaagagaggaagtcaaattgtctctttttgcagatgacatgattgtatatttagaaaaccctatcatgtcagcccaaaagctccttaagtcgataagcagcttaagcaaagtgttaggatacaaaatcaatgtgcaaaaatcacaagccttcctatacaccaataatagacaaacagagagccaaatcatgagtgaagtcccattcacaattgctacaaagagaataaaatacctaggaatacaactcacaagagatgtgaaggacctatttaaggagaactacaaaccactgctcgaggaaataagagaggacacaaacaaatggaaaaacatttcatgctcatggataggaagaatcaatatcatgaaaatggtcatactgcccaaagtaacttatagattcaatgcaattcccatcaagctaccattgactttcttcacagaattagaaaaacgactttaaatttcatatggaatcaaaaaagagcccgtgtatccaagacaatcctaagcaaaaagaacaaagctggaggcatcactctacctgacttcaaattatactacaaggctacagtaaccaaaacagcatagtactggtaccaaaatagatatatagaccaatggaacggaacagaagcctcagaaataacaccacacatctacgcccatctgatctttgatgaatctgacagacacaagcaatggaggaaggattccctatttaataaatggtgttgggaaaactggctagccatatgcagaaaactgaaactggaccccttccttataccttatacaaaaattaactcaagataaattaaagacttaaacataagacccaaaaccataaaaaccctagaagaaagcctaggcaataccataaaggacataggcatgagcaaagccttcatgactataacaccaaaagcaattgcaacaaaagccagaattgacaaatgggatctaattaaactaaagagcttctacacagcaaaagaaactatcatcagagtgaacagacaacctacagaatgggagaaagcttttgcaatctatccatctgacaaagggctaatatccagaatctacaaggaatttaaacaaatttacaagaaaaaaaaaaagcaaccccatcaaaaagcgggtgaaggatatgaacagacacttctcaaaagaagacatttatgtggccaacaacatatgaaaaaagctcatcatcactggttcttagagaaatgtaaatttctctatcacaatgagataccatctcatgccacttagaaaggtgatcattaaaaagtcaggaaacagatgctggagaggaggtggagaaataggaacacttttacactgttggtgggatggtaaatcagttcaaccattgtggaagagagtgtggcaattcctcaaggatccagaactagaaataccatttgacccagcaatcccattactgggtatatatccaaaggattataaatcattctactataaagacacatgcacatgtatgtttgttgcagcactgttcacaacagcaaagacttggaaccaacccaaatgtccatcaatgatagactggaataagaaaatgtggcacgtatacaccgtgaatactatgcagtgataaaaaaggatgagttcatgtcttttgcagggacatggatgatgctggaaactatctttctcagcaaactaacacaggaacagaaaaccaagcacggcatgttctcactcataagtgggagttgaacaatgagaaacatggacacagggaagggaacatcacacactggggcctgccaggggcggggtgggggggtggtaaaggggagggatagcattaggacagatatctaatgtagatgatgggttgatgggtgcagcaaaccaccatggcacatgtatacctatgtaacaaacctgcacattctgcacaagtatcccagaacttaaagtattaaaaaaaaaagaaccaaaactaagtcaatgctcagcttgtggcttctctaagtggttttatttcttctctcttttcacctgcgttgtagaggcagaggcaagcatggaggttgggagttgggctagtgctggctaatgggatgctagcagaaggagcatctcctccagggagaaagacaaggcacactgcagcccggaacattggcaaatggatggatttggcagagaccctccttaggggactctgaggcaggcattgtcaatagaactttcatttctgcaaatgactataattgtcacatgggaaatttacagttaagagtttggactaccaatctcaagtgtctgactttccacctgttactccaactgcgctctagagccacctactcactttctctgtcctctgagtctcctgcctcagtgtctggttcttcttagtactgagaccatttcctctgagtgttgtagaactttgctccttaattcagctaaaatccagcttcttgtcacatgaccaggaaaattcaggcatttagacacattgaagggtgagtagagcaggactttattgggcaaaaaggaaaaaaagaaaaaaaaaaactcagcaatgccagatgaagttcctgctaacccacccccacctcccagattgattccagggtcaccacaggaactgaagagtgcaagctccacccctgcataaggtgcaaattctgcgtggcttcacccacttcccctggtgtgcatgttgggctccagtccactgttagcatgcccaggcaatccctgggcagattctctcatctgcacaaaagcatgtgatataaacacttgtggagctagtggtagattctccagagacccctatttatcagcctaggcattaggctgtctcatgagtactgcctaggccttcagccacatctaagtgtctcacagaggtgagtatacactcctaagggtatatacttctgtatttttgaagagttatacacacttctgtgaatcttttgtagtgtatgtatgtgtatgtataaatttgtctttgtgtatttgtttctactcctgcactagaagtgggattattacaaagctcagtgtgggtatttcaggggaacactcatcccaaaccctctctgccatacatccttcagcaacaggatcttttggggtctgctgccttaagccatgcctagaaactagacctcgatagtggaattggtgtgtagtgctttagaactaaaggagacctttcagaaagaagtgtcaaggaatagccctatcttggcatgaggctacccaaactttgattccaaatctggaagatgtggttgggagaagtgaatctggtggaggaccctggtatctaattccctggctgctgccatccacagtcagtgagtgggaagagaacactatcctgtgtctatcaacaaattccaaaattagttccttttcacctcttggctctctctttgccacaaaatccacacattcaacaaggccagtctttgtaagtgttgtgataaactttcctgacattgacaaacaattcatgtaatttaggccttgacaatgaaatatttgctttggtaatctttgggatgtagtgtgtctttttcttctctgaaggtaacttttccttttttccctcttttggtctggataaatttccactcccagattcaagggttttttttctggccgcctgagaagtcaattatctctgtagtctaaatcttcaaactcttcattaaccacaatttccttcttttgtgactttgcccagatctcctcttttccagcttttttctgcttctcctcagtcagcgtgggccagaagtctttctcagtaatcaataagactatccattccttttggagatagtatcagtttatgccaaaatccagtcaaatacatgagtcctttgcatacaatggtgatcggtttacccgaaacgaaccaggtagctaatctctagaattccaaattctagttctctggatttagaaattaactcaatattatgaaatcaaatatattggaaggtgaacaaggaggagaaggaaaaccagatacataattttatgtaattgaagaaatagctaaatatcttccaccattgcagtgcacctccttggaggcaacataagtgaaatcttccataacatctgttttgaactttgcatcttttgcatgttgctctacccttcttgattctagcaaggatggtaagtagaagaacgaaaaaccatgagagaggctgtgcttgcgatattgccagcctgactggaaacaggaaataccaggaatcttataataaatgtggagacttccagcctaatttcacagtctcagaagtttgaatagaggttagactaggctgcaaatcttgggcgtacatttcaacaaaacttccggtcacatggtgacccaccctgtgtcagaggagttgcctgtgaaattcagtcttggttaactaaattctgagatagcaaaatcccaatgcccttcaactttttgaggagatcataaatagaaggtgagatttggcaaagttggacaatgagatgcagacaatatcaccttgataattcttcaaagccaattagaaaaccttttgctgtggcttagataaagccctattagaaaagggggaggaatttggacaattactactcacagtagcagtattggcatcatctgagagcttcatggaaatgcagaatcttaggtcccaaaccacatctgctgaatcacagtctgtgttttcataaaatattctagtgatttgtatgcacagtgaagtataaaaagtgctaacctggaagactcctgatagttctttgaaagttcagtagtttctacttggcgtgtgaatgatgaatagtttctgtaggtagttaaatacctatgcaatactagctatctagtgtagatagtatagtttctacactgctttctataccttccataatctgaagaataccataaccctttccttcaattaattctcctgaattatcttacagtgtaacggtttgaacgtgtgtgtatgtgtatatatatatttctcctgctactgtgtagcaaattataataaatctagcagcttaaaacaacatacatttattgtctcacagtttccatggattagaagtctggatatgggttagctagggcctctggtcaaggtctcatcaggctgaaattgaaggtgtcagtgggggcttctctctcatctgaaactcaaggtcctcttccaagctcattggttgttggcaaaatttatttccttgtgactgaatgacttaagtccgttttcttgctagctgttgactgtagcttactctcaactcctggacactgcacttaggtgtgtgctacatggcccctttcgcaccaaggctcttcatgtctgctaggccatacaaaagcatctggtgcttgtctcttctgtgagttcacctgattaggctcagcccattgaagataatctcccttttgattgactcaaagtcagctgataggaaacttaattctatcttcaaagtcccttttgttacataatgtaacatgattatgggagagatgtcccatgatatccccaggtttttggcaacactcaaggggaaggaattacatacagcatgtgcaccaggcaatattagaggcaatgatagaatgctgcctgccattataaatacacatacacacatgcacagacccacacatatatagattacatataatgtatgtatatgtaaatgacaggattttagattaaaaactctttgaaataaactagtgttccccaaactatattgcttcacttaacatcttcattatttttacaaaaccttgaaagaaaccataccattgttcacatatattttctttaagttgattactttttaaacttaaaaatacgctaagaagaaaactttagtagcattaacataaattgacagccattatcattcattaggaaacaggaggtaacacaaaatataaattcaagagaaataaagcattatcaaattaaatctatccaccattgcctgaacttgaagtctgtgcccaatgattgcttttctttgtcaaaatggaaatgtagcaagtgtttaaagtgtttaaagattaagatggcctaactccaaatcgagtatttcttctgtaattcattgtcgaggtaagtgtaaaaagaatcactttctcatcttgtgattcaatgttctcgatgctgggtaattgccacctaactaaggtgagtcctacatcttggtatttccttggtttcttgaagatctttattaataataataccttttgccccaagtggaatagtatgtaaaccttgtgtgttattttatctcattaggcctttgttgcttcctatataaaatattcatgctagttagtatgtcaaatattctgacagtaccagaaacaacttctgagagctcttctagctccaggatctataattatatccagttagcgatatgagattaatgcatgggattatttattagattggctggctagctacctagcaaggagtagtttttaccaaaggattaggatgtagaaagatgaaaagtggaactgtagactgtgcccatttgaaatatgggctgtggctcaaggaagacaagcctgtgtagggctatgtggggtctgtgggcagtcatggaggcaataagtggattggccatggactaaaaagagataaccatcaaaaagtttaggaggcatcagagaaaaaccatttaattcacttctgcattaggcagaacctgacagttcacagcatactgggtatcttctatctgcccctttgggtccattgctactattatctgccctgctctgatcctggtggatctcctctgacttccagctgggttggtcaatgggaggtggcatgaggagatgcaagtactggaggaaatgatggggcacttattctctggcttcctctctgccccttaatcatgtattggctgatcctgccatggaaggccatagctctttttggccagccctcccctatagctaccattcagcattccagtaactgtccccaactcttccccttcctggctcagggttaaaaaagaggctccctctcttgccattttctgttggttttctgaacccttcccaaacactataaatagtcccttccttaaactcagtttgtgtgtgccatcatttccctgcaggatccagtatacagtcctcagcagatttaaatcatggatgctttagaatactgcaagcctgtaagtaaaggagatgctctcctgcaatggctcacttttctacctttggctgtgaagtgagatgtgcaacacactctaggaaccccccgcctcaatccagtaacttaatctgagtccccccttcattctgcagatctgagctgtatataaaaaggtaattggaaataatcatttattattgtgttttaacttaaaaactgtcttctaaaagtgtaagaaatagatttactctgctaaagtatagttaagactaatttatatttttaatctcaaaatggcagaagtgctttcgaacttggaatacagggcaatgactccttccccttgtattatacagacttgacttgaaaggagacacttaggtccattgaaacttctcagttttgtcgatcaaaaggatcaaagtcaaggggataagcctgagacaggacactgagtgtttcataaaggaaagagaaatgaggctggatgccaattatcctagaattcaatggtttcaatttcaaacaaggtaggaatcaaaagtccttttaaaaaattgaacaattattatattccaacaaaagattaggtaggatgaacctgaatttgaagataaaaagacataggtatttctttaaaaggaataacactgagcttgtcctgtattattctggcgagtctttgcaatgaaggaagagctgacgctgttttttggtgactcaactttcttcaactagattaggcttagagactgtcaagagtgatatttcaaccagaaaatccaatgacagttattctttatgtatgtgactgggtgaaatagtgtgaccagatgatcataagctcttttgtatataaatatggaacagtttaggcttgtaactatagcttctctttgaaggatttgtcttcttaataagaacaataaccatttttcatttattgagtattaaagttgaacaaatatggctaagaacccctgctgtgggaaatgcctgcaggtgattcatagacaactcaataaataacatattgtgcaatagtttcccctttcaatgatctttcaggccttcagattatattaaggagtcagttttagtttgttgataccatatttccttgattctagggtgtatatagttttacatgataccatcattggaattggagggggtcttataatttgacatttcccaaaatgttgccagtcatatgtcagtaagatgcgattggattgtcattgtgtgcctgaacttcattttggttactcttcatactgttgtcacttttgtgtctaaataggtctagaagagtccttttaataagcactacctatagtttctatgtgagaacagagaattatgtcatagcttaatggacagcagtttctttttttctttgtgtaacatcatataataatgtgtcttaccttccatggcatcgtagagtctatgaaatgctcactttgaggcctggtgatcgacggaatggtcttgccaagctgaggagcaggctgaactgaagtcatgcattggcaatcagggtagagccaaggagacttcttcaggacagggagagcaactgcatcaaaccataagttagaggaccacgtgaccttggtcaaactgatcaacttctctaagcctcagtgacacttttactaaatggaaataacaataatatctaccttggtaagctgtaaaaattagataagaatgtgtttataaatatgtttttatgcaattatgcctagagacattttataatgttattgttcataacaatatacaagaatttgtcctacagaaggaggatggttggatgattatgtatccacataatagatgttaatgcagtgcataaacacaatatgtaagaggacatttatgatacagggagacgtacaagatgaaatattaaccatcgaaaggaggttacataaacaaatatattaaaaaataaaacaagtaattttatttttttaaattttttactcaccactatacaaatgaggaaaaacaagtaattttaatgtgttttgtaagttgtatgtgtaaaatattactactaaaatacaaacaataataagtgcattttctattacaatatataaagcaagttcccctacattttcccatttcattttctcattgaaactctaaagtgccaggtgtgctaccaggaaatgacatcaaacttagagagtggctgaatgttcacaatggctgctgtcagctgtgtcttcatccatggcaatgtatgagttaatgtccaggtctgaggtgaggggagtgggacacctgcagggccaggtatcagaataccctgtgtctcattctggccctggccccgcggtgctctgccacctgccaccttgggtttagataagtcagtctgagtctgaggctaatctggctggaaaaggaagtgaaaacatcatagactcattgaaagtgaatctgacgctattcaacttatgaatctagaaactttgtccccagttaaatatcttgacttgttctttaactcctccttctgttcatctttcacatccatctactgggctctcatactggtgttctcttcccccatcgcttttatccatattttcttccccattgctacagcctgaggacaaatcatcaactcattcacggaaattgacaattcatcttgctctcttcagactactgaagatttttaccacttttgaactccattctcaccaattcgtttgcttctcccgtgtgattttttcctataactctaactagcatttttgaggctcccatcatattggtccgttgcctgactcatcccattcccatgagaaccccaccaccaccattgcccccttggtaatcccagtagtaatcctatgcatttccttcctctggcccctctcatttaggctatcttctccatctctcacaaattcttcaaattcgtatcataatcgttctctaagatgtacaacaaacattaaaatcttcaacctctcccagtgcctataacattgaacaaacagttggctctcccttagctcatgccttttaatcaataatattatttctgctaattcagttttaccagaaacaagtcatttttctcctgtggacccaatatcccttatttgttataaatgaataataacacttcatgtttcagctttcacacagtgctgtgttgagaatcaaatactaaaatgggagagaaatcccttagcacagttaaatcacccaatgtcatatcaattggtgttggctcacagaagcacaacatcatatgtagaagactttgccagggtcttgagcagatccccttgtgtcattattaatggttccatgtgctcattcccaggttctttgtgctttgacttttgcatcttgttctttttagagtcttgctcccacaaatgcctagaagtttatgtctcctcactgcaggccttatctgataactgatgggtaaaggagtatgaaagctcagctcctgttccccaagaaggacaaactctgaggtgtgatttatgtcccagaactccccaaggatttggctgaggctgggatgtcacctgacataatatccttgcttggtgtgtcttttcccctgcctgtttctcccactttcttgtcagtttttctttggagaactttcttcttttttaaatttttatttgtcaatttattcatttatttattttttaatataatttcatcttttgttttagacttagggcgcacatgtgcaggttcgttacgtgggtatattgcatgaccctgaggtttggggtataaatgattccgacacccaggtagtgagcatagtactcaacaggtactttttcagcccttaccttccttcctccctctgctcttcaatctattgtccttagtgttgttgttcccatctttacgtccatgtgtacccaatgcttgggggacttcctcaatagatcacttataccttttcctcaaatcttctctggagaactcaacctgagacattagtcttcaaagcttgttcaaagatacgatttccacagaacaagactttcattgactcatttctcccacataagtatacccatatactctcaatgagtatggtgaaaggtataagatacatccttcgaaatttaagccactgagccccaagccagataccacatactctcattgagcgtacagagatacacttacatgagagtgctgtcctaagcactgagatgcaaaggaatggtgtaagttcctccctttgtggacataaaaacacatgattaaaaagtgacagagccaggatttgaattgagtatcttgtctctaaatcaattgttcttttctctgctttctgtctgtggatgcaaaatgcttttatatgccttcctgaagagttttgaaggtatacgtcatttgttgattacaagaatgttccacttatatcacagtaaaataatatcagtttttatatcccataagcaaagctacataaaaaaatcttgtacacatttagtttgtttttcagcccatttggtttcctgggaaaaacatggtacatggtgagtttgatcagtcaatattgcctgtgatttctgagttgattttgcagttagacaaaggtttaagaagagccaagtttagtctcatagcagccagaggtcccattcatctgataactgaggtcttagataaaggcaaaaagccatctatgggctttttgataaacccttcacatcaaggctgatatctcaggaagggccaggccaaaggtgtaagacacatccttcaaaatttaagccactgatgcccaagccagaaattacatctgctgatattttgaagtccaagggaagggtggagctgcagatggagaattaagaaatttattacttcttcaagagggcaggcagatagattggcaacttgtgggggactctgagtgccttgttcacaacagactccaggtttttagtttcttgatgccatagtcagacagtggtttaatgtctgggaagtataggaagaacgtggaggaagcattaagacctccacattgatcttaaaacactcatgctcagtgtaatttatatttgtactgaccagtttagcactcctctgggatggatcacttaattagaaagaattaaaaaagctgttgtttgatgtatgtgtcttaattatttccaagtggcagaattgattcccccgttatgaatttgcctccatttgtgagactaatgaaaccccattaaagggaatggaaggtcagaggtcaccctttctttacatttaatgtcctcaagctggtagattatttatgaggcttattatgctttggataatgttcccagtttttcagaagagctacattgctgtgtaaccacgagataccacacatctcttcattgcacttgcactccagatgtcaactagaaagtagactgggaatatgattaatcgccatgggtattggcagtaatcaatatggcttccataatctcagatacagggacttggccactatgggctatacagcttgttctaacccaaagttgtagatagtgctttgtattctaaagagaaagacaatgcatttttaccaagagaattcatagactgcattctaagatgttttttcttttggatttcaatagaaatttcaaacaaaaaaatatatatccccctggaaaatgagaacatacagcataactgtgagaaggatgataagtttgtgttcctaaaatagacttcttgggttcaaataccaacttctttacctataattcgtgtggggtagtcacttaacatctccatgtctcagtttcctcctctgtaaactgggcataagaaacaatgttgagaaataaatgagcaattttagcagaagtgctttgaataatttctggtacacattaagcacttaataagtgttattattatgaagatttataatttctcatgggattagtttctttatttccaccccacttctgccccacagcttaacttttggactggtccagtgggttgactctttggtggattttctgtttatttgactctggtttgtcccagctttccttcaagtccatactctgctggcttctctctctgtgcccattgcctcttctgggggtgatttctcagaagccagttctcatcaggacaggaaatggaaagtcactgtgcatgtttttgtgtaaggggccatggtagggtagtggtcagatcacaggttttggagccagatgaatcaggtacaggttttaaaatgtataatgggggcttcctaggtatataacatccatcaaattatttccccactctaagcctcacatataaaatgggtataattcataaagtggttgtgagatttaaatgtaacaaagtgcttggcataattcatggctaagggatgtctttaatacatgttagctcttctatttatgtgtacatacacacaaaacacatggtcaccagctaataccaaggtccccacaatatgaagagattgttacctttcaagaacttactgatagatcatttaaaatttaaaaatctgccatctagtttctaatcaacactgtttcgagttgtctttatcagcttttaaatgaggaatctcactgaattatgcaaatgcaaagcgaaaaattttaccacggccaaagtgctaggggttcagacagctctattcttcttttccatcttctctgtttttagaaaacccatgggtgtactctcatttgtttaggtggtcagtgagatggtattcctcatggccaatgaaaggcctgacacactcctctgacagatggcaagcgctgggccctcatgaatttgttactgccataattgaaatcacatttgagccttgtccttcaccactggagagaaatggggggttttacttgcaaaatgtggagctgggaaatccttcagaaggtgaaggatgtgttgaggacaagactagaacccccgtcatgtggttgatgccccagttcagggatgacccttgatcaggcttggttggattcctcacagctgcaagagatagggttgaagagaaacagggaagcccagttaccccggctttgattctttaaaaaatctaaacctgtgtggagggctaccattgccctgtattctataccacaggactcaagacacgttttccccatctcttgagttcctggtggcccaggctttgaggggcacaacagcacatactttgttaatcactgggtagttcccatggtggattgtgatggagtcactttggatggtcactggctttttacctaaaatatcctgagatgggcagaatgatttgtggtgaccatggttcaaccccacatgacaaatttccacccagatggcattattttaaaataataatagcttcaatttatcgtgtgcttaatctgtagcaaggccagcattttaaatttaagatcatactttatcttcacagaaacccggagaggcagctgctaccatcattttcattttacaggtgagaaactaaagcccagagagaggatgtttcacataatctgcatagctagaaaagaggagagtcatccctagagtgacttatacctagaatgaccatatagttcattgtctgagctgtgacatttttcagagtgaaaaggggcattattaattatgacaccagggccatccacacaaactgggacacaagctcttatcaaccaccaaactttgttaaccctctaacagagctttttctttttcttccttcctttcttcttcttcttttttaaacaaatcaatccagggaagtgattaaaagtgagtcttccaggcatcttttgctgggttggaagatgaacacttctggggcagagaagcctttgaacattccttaaaggcatacatatttgctgatcccctgccccatcttgtctcagtctccaacccagggttcaattaaatgccccttcccttcccttcccttcccttctcttcccttcccttcccttccctcccctcccctcctgtcccctcccctcccctcctccctccctctctctctttctctttctcaatctttctctttccttccttccttccttccttccttccttcctttctttctttctttctttctttctttctttctttctttctttctttctttctttttgtttctttttctttctttctcttactctctctctttctttctctcttttttcctttcttctcttcttctcctccttctcttcattatcctccttcctctacttttaatgtgccctgtattcaccagtgttacacttttattttgattctcaaggaaccttctcaaaatcaacattgtgcgtcaacatgctagggaagatgagaggcttcactttgtactgaataccagttagatatttttgtcaccaataatgttgggataaaataagtcagataaatctctaaagtcttcacaggcaggactactgtgaatttaattctcagggaaggagacatggggagaatcatctgaatttagaattacttagtagaaagttttgggatatgaaggcaaagaaaattggaacataaaatattctgatcatcttcttcacaagacgtgttccagaacacaggaagataggatcaatccagttgtgccaaatattgataagctgtggctcttagttaaatattcatgacaaggatgttggcttttatccaggggcacaatagtttgctttgtttggggtaggtgatgccattcacactttctcagaataaacacagatgactccaaattggatcatctgggacttggatattagtagtctttgcaaactttggttgggcagtgctcttcagggaaaatttagttggccttttttgaagggcttgtttctgcaaggggtaccatcagagggacctttggagtgtggggacaactgtctcatagcttgccagaacatagatgttctggcctctgagcaaaacaaatgaggggttcctggatgactccatcttggtggaatggtctattttgaagaatgttttaattagtaggttgtaactaggactggccttagggaagcccaaatcttttgctgccttcatttgtaaaggccagagctcacaacctgattgccaaagtaagaaagaagctcatgattatgtgtcatcaagcaagtaactgtggaaaattggagcttcatctctctgggtgactctgtgaggcagggtagaacatgtatcttagagttattctgcccatgaggcaagagctggggcattaacccctgacattcattggggaggaggtgctccttttggtattggacatcaatttttttgtgtgtttccagcttacaatgtaaatgggcagagtgggttccagcagccagagacagagagtctccaggcaaagaatctcaggagctggctggctctattaccaatcacgcaaatggtaagtgtagatgggatctgaatagagcatggataacatctgtgacacagtcctttgcaatgggggcaatggcaggtgaagaagacaggaggaaaagggtgggataaatgagggagagtttttaagaagaaccccagtctagcctatacccaaggcctcacaaagtctctgaaagttattcccttggagttgtgtcccacagtctctaaccgagagctgttcaatataaatgaggatcagtaatgtaaagtaactgagagccccaaagttgagcttcttggtagtcagtgaaatctctgaatgcaattgttggtgtgtggattcctatgtttatttttatagtcctttttattcattgaaatacaaagacaagaagagttaagaaccacagttttagaacttacagataaaattgaagtgcatttgttttgttttagctttttggatatttgaaaccactcacttcagtcatttcttttgtcattttaatgaattatttgtgttctccgttttctttcaatttctatatagcgatttcaactgaataaattttaagtattctggatctgacatacagaaataatgcacagattttcaaaatgttgagttttgtttgtttctctttatatcagtgggattttctcttctacatatctggaaataaataggcttctgttatcattttatacatttataatatctataaccatatagttcttaaatggcatataattatctgggtataaatgatcagactaatgcatgtcgcctttttgggttaatagttaggggtatgtgtgtatgaatcccactcccccaactttgtttttctactgagttttaatgataaatcaatgaggctgggtgcagtggctcacgcctgtaatccccgcactttgggaggctgagcggacagatcacgaggtcaagagagcgagaccatctggtcaacatggtgaaaccccgtctctactaaaaatacaaaaattagctgggtgtggtggtgagagcctgtagcctgagctacttggtaggctgaggcaggagaatcgcttgaacccgggaggcggaggttgcagtgagccaagatcgtgctattgcactccagcctgggcgacagagcaagactccatctcaaaaaaaaaaaaaaaagataaatcaattatatcaatataatttttatttccatatatttacataatctcttgtctctcacacacacacactttgaacatgaatttttcacagaaattaagaacatacaatcagctttttgctcatcatatttcacatttggcattttagagaggaaagtgtgtcttcagatctctggatctgagttgctaataggagggttgtgatggggagggtaaaggggactttggtagcatctcacatagtaacaatggcagctagtcttaaaatagctgaagaagttagaaggtagaagattctacatctgaaagttccagagaatattagggctttgccccaaacccaaacctcttttaagacagatgtgagatttttgttccattggacagagagtagccaagttggcattggtttcattgataaggtaggtcaagtctatcttatcaaaaagagacaaattcttatccacagaagagttaaatactaaaattttactcacaagttcatgctgcatcatttcatttctttgtaaaatattcattgagcacctaatatgctccaagtacctatcgttctaggtgccagctctcaatagctattcctaccctcttaatttacctgaaagtaaaggccatgaagctctgcttcctgcacttctctgttttttgcctacaggtgggcgggcatgtatacacttgttaatcatttacctgggccttgaactcttgggagaagcattctaagcatggaaagaattctactaagaattgcctatcgatcaactaccctttagaatttttgaaaggccagctttatttgcacatgtaatcctctaaggaacacagatattctaatctaaagcatgaaaaacagtaattcattgttgtactcaagcaaggtataaaccacgggaaatgatgctttaacagaataatggtgtcaaataattagggcttctagggatttggagccaagtcctgcctcaatcatttcctggctatggagcaagttctataatcagagttgggccactggggcctctgcactgtaccctgtgctctaacaggccatgtctgttagatttgcatttctccccattcatcctgctcctcatggaggcaagaagttcacaaggctagggaacatacccacctaaaacccacactgtcctttcagaatatgcttggagtaaccttgaccaggatccactgctaaaactgcccttagtccttcttagggcctgcaggggactcttctctcagtttgtcctccagagggtgaattgcactactggcatacacacttttaagcctgaggagtggcgaaggggcagctgtttactgggtggtaatgcgtagaggaatcttgggtaggtagcctgcactagataatagatacaaggcaattagacagtccatgttcagcaaacatttgctataagtttgatcactggtaaaaaataagccaacatccataatgtctaaattgtttctttctacatctgataaaaagagaggaaaaggttagcatgagattgagccatggtgactgggtgcatttattgtattctaagagacagacctcctgcatggacatttagctgtagttacatagaatggggcatggttaatcaggtttttcaattaattttatttaaaaattttccatccccagtgtgtagaagaggggcatacctttagataaagacagaacgtaaattgtgtgaaggagaagaaaaaaatatcaaatgcactctgaaagcatacagggaaagatgataagaaaatatttgatatattatgcccttcagagataccttatcaaagtctgggtcagcttcattggtttcacaaaatagtcttgttatggggacattttccagggacagccagtcctgtgacagttgtttttggggtttcaagttcaagagagattactgtctccaaagcatcattttaaaagacttttttaaatggcagggggtaggtaatttaatctatacattgttgtaaaaacgggcacatgggctttgggttgctatagcaatcaggcagctcaagcaacaggaaccaggtgaagctttgctgcatacatgatgtgagtgacagaggctgaggtggagaaggaagaggaaatctcatcgagtgtatagtcaatagcaaatgctttcaaagtgaaaatgctcagtggcaagtgacttcaaaagctgcaaggtggtgtccagaccaaaaaaagcatcccctttagggccctggctgctgaaaatttttaggatcagtaatgaagtgttgtcttatgttaggttccccagatgcagagtttgagacaagaatttagtgcacatgatttattgaagtcctctgaggagagagacagtgatggaagtaggatgggtccggaaagatgttgagcaagtgtataggcttagctggagttgagtttcagcctcatctcatggggagctctacagtttgatcttaccttaaggtcagaaaactgtttctatttatttattaaattcactatcagttgattattggatatctctccatagcccccatcaggagcaggaaagtgtaacctttcaggcaaagtggctctggtttggccaagggaaattatccaaataaggggcaactgtaaaacactcacagcagctggggaatgggcagagtagcctgttaaagaaaactggggtggggaacccagaacgtccattacaagcattgtgatatgtgattatatgtgtgtgcatgtatgtgtatatgcatagatttaacttctagccttaggattatgcttacataatcatgtttctgggaatcacaaatatgggtttcaaatatgattacatctatttacatgtagatatatttagtccacttatgagtattaaaaagacttatggcatagctgaagtctttccagagtgctgaattcctactctgtacaaagctgtatactctgggacaacattcagtcccaattgtgtaaaccctagtactaatccatgggatttggctttaccttcatgctagggagtgagttgagaacaaggactgtctttagggtagagaagtgggaggtttgcattaaacctttgaagatacgctgcagaagagtcttccactgacttcattagaattataaggaaagagagagaaaattcttcctctggcttttcttttggtgaaatgggctgaggatgcaggcagcttgaatccatttcccctccccttgctatggggtccaggagttaactcccaagggtatgtgatgttgagacaaagtcaacatgaaagctattccatatttctggtttgccatgatttcaatttccattgctcaagtaatacggttgttccctgatttcagcaaactatctatatccttgcagcttgtcagctactgctgcatttcatatcagaccaaagcaaattagccacagcacttccaattaacatgaccagcattgtgctgcatataaacaaaactggtaaaacatacaccttgcatcttagagtggaattgaggatagcttccctccccacctatgtcttgtgcacacccaacacaaggagtgaattgcagagatttttaaagggtataatgccagttgtatccagcagcttgcattctacttaagatccaatagtaaatataggaaaagaaaataggcacccagttttctattccttagaactaccttagaattttcagaggacttttttattggtcacctgggcaaaaaataagataaaataaacatgtgagcaatattgtagaaaactattataagctgtttcagtggtattaaaaagttctctatcacacggatgcctaaaaaacaggtcaacaggagatgtagaggccacagaactagaaaaagcagtataacttttacaatgcagttacattaacatcctaactgaattccttcattgtggggttcataattgactgaagtttttaaaacctttttactacttaaaaaagtagcttaagcttttgatttttctgtgttctattatttatattcttgttcagagtatggatttggaggggtgtttttgacaattggttcaatttctaaggatcaaagacctaagtaaggtatgactctctgtccctgcctccatcccagaatggccgctttaccatcatgcaattagaagttgtaactgctttgctaacagcactgtagaaccatgccactcaagtatcctagaacaaagaagtagggaagacgtctgggcagggttaatagtctttcagaactgtctctgacttgaataagctgagtgactttctctggctaaagaacaatagaaagtatgatgcaagcagagacttgcaatgtgtttgagcattggggctgggtctttcttactgctctttgcaccttgagaccaccaagtgaaggagcctgagtttgtctactagaggatgagacacctgacccaatcaccaaacatgtgagtgaagttatctcaaataaaccaatcaccagctgaccacaggcacaggcacctgagagcccagcatgtcattcaagctttcccagacctgatctgcccagatgaaccacagaataataagcaaaataaatggttgttgttttaagccagtaagatttgggttggtctaaagaaaactgacgtagctttgaaaacacagtggcccatataatttttaaagtcatcttatgttcacaaactcttaattatccttgcgttactgtgaaaggtagattaatttttatcttttagtgcaacaagtgggtggatctagaattcctcatttgcaggtagtttattcttaggactaagcagccctagcaccccattagaggcaaaaactcttaagaactactgggatacactctatttacccttttgtgctcaaccaaatttctactcctccattccctctaccctgagggcatcttagcagagaaagaaacttcctggcccgtacttttcatactctacctgtagaataggggccacatgaagggtttctgtcagactctctctgctcatcaatgcctgtcatagaacttacactgagctgggctcagctggttagtgatgtgactttaccaatattgagggtcattgcaaagcaaggacctgacaagtagagccgggctgtagcctgagatttggtcctggcacaaaggaaacaaattacttaatgaatgactgcaagtccttgatccaccgaatgtgggcctttacctgcctaacacgagtgttgacttgttagctaacacattccacctggaagagtcagcagggaaaccccaagctggcctggctctggctacaagaattcctggcacatcaactgccgaataatggagtgaagcttgcaaacagaggagatattttgattcttaagccactagttccggatgttcacttctgagatttctttgcagatgcaaaggagttgcagggtataaagaatatgaagaagagaatcaagaaacctgacttcttgccagagctctgccaaccattaaatgtgtgaatgtggccaaggcactgtccttttgggagcctccattttgtcactggtaaaatgaggaagctgaatatattttctcttgggaacctttgaggtctatgtatatgtcttattcaagtgcataaatactctaagagagaaaggatctttgcatcttagagaagtatataaactctaatatgcataaagaaacagctgggaatcttacagtgaacattctattcaggaagtctgggtggggcctgagaatctgaattctattaagctccctggtgatgcagatgctgcgagcctatggacctcactttgagtagcaagaccctacgggatgctcttcttatgttaacctctcttagttccgtgtagagcagggatgtttattgtcaggctaacatgagcagaagacttgaaaagcacaaatcatttgaatttgttgtttttgagtgctcatagcatgaggaatcaagagataatttttcttgtggttttgtaaatgtttaaggctaaatttgtttctggagtcccttctggttttggtgagtgcttcctgtggagactttccatttctgctgctgtgatttggagtgaacttctagagatgaaggttttaaaaatgtctttgatgtctcttatgtagaaccacatatttcacagatgaaatttattgcaggatgaccaaaataatgatcaaatgcagaacagctagaaacttgtgtagcagttgtgaaacatcctggataattagaaaacttttaattaaatcatcagtgtttggtgataaaaaggtaaatatttttaaaaagactctcattgttatgaaagtgtacctcaaactttaattattatggcctaggttgggattttagatagtaagccagtctgtttttttttttttttttttcttcttctagttggggaaggtagttggtggtggtaaaatggtctgggaagctactcaagcactctgctttaaaatcatccctagacagtttttgatctctggtataacaccaagggttagagggataaaggaagacaattcttttacatctgtcttgaggaaaaagcaaatgtgggaagatgtaattttgctttatttcccaagggaaatgccaacaatttttattgttttctaaacacctaggagtggtaatttcccccaccctctttggcagagtctacacaggaactgcaaatttaactgttttcaggggctaggccagtaaaataactgagtgaaaaggctggaacaagactaacaaatggtggagactatactcagatggaaaatttgtattccaccctaacagcatagactttatgcatttcccatttttttctaatgatgtagaaaatctcttatatttttaaatgtttaaactgagtttatgaagaacaatgcacaggcccaacaaaacatacctgtagattagatttgtttcagagaaggatgaccataattagaagatccctggtctcagttacagatctagtttttggtctagagattcaataccttgtcccacaatatgaaaatcctgacattgtttactcagataatgatgaaatgttttgcagtttgaagaattgtgatcaatacatttatgttcatcacatcccataaagataagagatcttccagagtctgaaagagattctctgtttaaaatatattaatgaaaattaaatattgaaaaaaggtactcaaaaatttcaggaaaaattatgtgtcctcagaaataattttttaaatcataaatatattatattttctgaccttcttatctatgaacacttaggtagttccaaaaagttcaaagaaaaaaaggtaactgaatatgaggtatacataagttgaaccaaattgttttttgtgtagcattatacaggacacttaaaaatattttgttattagctattttctccttagcatcttcaaggttgtgagtatagttttgctatctagagatgagttaagtttgatcggcttctttttgaaatattgaacttttcctggcttctatgcatggcgcctgtggtcttttaggctgtttctctttcctaaacaagaacatccctaagaaagttcctaaaatctgttcctttgcatacacttccttcttcacaaaacacactctttttcccatagttttgactagaaccatatgaggccaattatcagaatgcgtgctttatccttaatcttacagcaatgccttgcccttttccccattcccacagccttacccccagtggagaacagccatcaccttgcctttggttgttttccactgtggcatacctcacagaataccacgaactcttcatagtttcaattatcaggcattactcttagccatcagctaatgtaaattaacatgtcaaatgctttttttttgttgtttatccctccttctgttaaagtctttaattatttcccaaggacaaatacttagtatttattttaatggtttaaaatacatctggatggccgggcgcggtggctcacgcctgtaatcccagcactttgggaggccgaggtgggcagatcacgaggtcgggtgatcgagaccatcctggctaacacggtgaaaccccgtctctactaaaaatacaaaaaaaaatagccatccaaatgtggagagtccagcaaggtcctagcatggtggcaggcgcctatagtcccagctaatcgggaggctgaggtaggagaatggcgtgaaccctggaggcggagcttgcagtgagcctagatggcgccactgcactccagcctgggcgacagactgagactccgtctcaaaaaaaaaaaaaagaaaaaaaaaatctggatgttttggcagttccaagaggtgagctccagacgaatgtgtgtttataactccaggtctgtcttttccacgatttgaaaaagaattaagaacattgtgaagataaaggtaattaaacacttaattttgtatgttgatgacagaaaataaatagctctgctggtcacacatttccataggttattaggtacctcacatatgctaattccatgtacttttccatgtccaggaatctattgtctccatcactgccttataatagtggaaatatgcctatagtttgtttaactttcagactcttccccactttaatccaatcttcaacagatgtattagctatagtgtaattggtgcatcgtgtatcaactcaaaaaaactttcattgattccttatttcctatggttaaagaaatctagaagctgaggttcttcataagctcatctgaatgactttggaaatgttatcttccacaagataagacaaatgttatttccaacttctctaaacacatggtgaatctagttaacctgacccctttcttgtctagagaatttacatgggcattctcattacttctcttctcccagggtgctgttctcacccgggagcttcatgctctacttcttttccttatatataaatgtgtgtgattgtggatggataagatatctgatctgtttgcaagttgcagacatgatgtctcattcctaaatatttcactgagtaaaaggactttcttttacataaccatagtattatgcaataatgaaaataataatcttaagactgatgaacttttacagctatgctacagactttattgcaatttccccaattgtcccactcatttcccttataacaaaagaatacgaaatcttgtccaggatccaatccaggtcgcttgatgcatttagttgccatattgcttatgtcttgttttatctggaaagattcctcagtttttcttgccttgcacatcttgacatttttagagagtacatgccagtcattttgtagaatgtcattcagtttggattagtctgtgctacctcatgattatattcaagttatacatctgttttttggcaagcacatcacagaagtgatgttaagtccttcttagggtgtcatatcaggagacatttgatttccatttgtcccattagtggtgatattaactttggtcacttgatgagggttagtgactgctgggcttctccattgtaaaggtactattttcctctttgtagttaaatatctcataggagatatgttgagagtagataaatatctcccctcacttgtttttgaaataattttagacttaacagaaaagttgcaaaagtcataccaagtttcaatataccttgtatctagcttcccctacgttagcaattcacaaaaacaaaatggaatgatcaaaatgagaaaattaacattggtataatacttttaacaaaactacagaccttactggaatttcatcggttttccccctaatactttcttctattccaggatcccacattgctttttttaaggttgtatcttcttagtctcctccaacctatggttgttctcactgtcatttcttgtctttcatgatgatgaaacctttaatgagtgcgggttatttgttgtgtagactttctctcaattagggtttgtgttctgtattcttttgattagattgaggttatgcatttgcggcaggaatgccacagaagtgacaatgtgttctcagtgtgtgatatcaggggaacatcatgttcatatagcttattgctggtgatgttaaccttgctcattttgctgagtagtgtctgctgggtttctccactataaagttactattttccccttttggaactgatcaatatcctaggggagatactttgagactatgcaaatatattatttctcctgaaactttcgccatcaattatagcatctattgatggattttacttgcaacagttattactgtggtcattgcttaatggtgattttgcttgataatactgtttctcaaaaatttttctctcattttttttagcatccattgatggttcttgattataacaattattactatggtaattttcaaatggtgattgactagatctccaatcttgtctcttaatgatgagcatgaattttttgggagcataaactagagttggtaaattcctattgtcagctgtgaacccatagattctattttatgtagtcctaatgctagactctaattactagatgaaaccaggactgctttgggagaaactattaactcagaggaattattaagacaattctatggggctacaccatatctttataatttagtaggtggttttaactttaattggctgctagatataatagtagcaatcactgacatttgtttgcaccctataattttgcaaagcattccttaaaacactttgaaatatattaattgttgtgtccacaggctaggtttggtttactgccacttacaaatatctttgtatagacagacctcttttctgatctattttctaaattttttttttttttttttggtgggaaaaggattgttggagtaagtaacactagcttgctataacaaacactaccaataccctagtctcagtagtttaaaacaataaaagtttattttttgttcatggaaagtatgatgtgaatgttccctaccagggaagatttttgacatggtcattcaaagacccaggcttattatattgggactccctcgctcttcggaccttgctggactctccacatttggatgacagaagagtaaagaaggaatttggagaattgcttgggagattcttatggccagactgaaaatggcaaatagtgcctgtgcttctgttccattggctagactcagtcacatggctattcttcctgcaagggaggctgggaaatatagtttatctaatctgtatgcccaggaggtagaggaaatggttttgttgaaacatagcagtttctgtcagttttgattttaaaaggttatcatatggcacatgaagccaagtgcttggctcagaggagattaattaatgtgctgtgttgactgcatcaggtgtaggggggacatctgtgaggctaagcctcagcctaatttataggaagaaggcttcctgactttaattctagttagctttgcaataacctttctaattccccaatagcccttctccctttgatcaaactatctctaagaattttctactctaatgaatgactaaatcaaactgttcctttaattaagcggagtaccgacatctttgagaaaaagtcattagacacctttcgatcccaagcttgtataaaatctggaagagctgaggaaatcagaagcatatctaagaccgacttgcagaaccaatataaagaatatatgagggcttttggaagagaagcctctctcttgccccatttctaccaggacaaaactctaaagtcaaagcactttggatcccactatgtgatgggtacaaaatgaagttttaaagtgataatttttaaaggcttattgcaaagaggcatgaattattcctctttagccagaagaggagtgcgctctcaatatgtgtcttcttcaagtctacccccaccatccacataacgaagatatactgatcacctgtatcacgtattgaaagatccccaaacccttggcagtttgtgcaatgaacattttcactggtcattagtgatcctcattaaagaaacctattgaagagagggcggaggcatcctgccagtctgaaaggggttattaaaaaaatccttgttatattaaaaaaatctttgttactctcgatgcttcattttgaaggcatgaggttctcactggatattgcataagattgtaccataagagcagcttaagaaattaataaatctagctcaggatagagatttttttaatcagagaagagtcattccaaattctgtattgttggtaaaattagctgtctgtgaatcagaagaatgttaaggtaatatgacaggggaaatactttcagtgaaaatgattctctatggttgatcctggctgcaaaattttctgccaacagaaattgatgtctgtgttggtgctattaccctcactttgctgcactgccactcccatgctgtggccaggcagagaaacacttgaacaccatgttcatggacatcaatttatctttcaagacatcatgatattattgtgttattaaaaagaagaaagtggagtctactcccttcttgcttaatctacctccagtcctgtaactggtgtgaaacctgagttttacagttggagggcaactgccacatgacctcccctcttctacggagtcatgccatcaaactgccctttctctttattattatttattgttccttgaactcagcaagcaaaagtggctcatataataactctggcagtgccaaaacaaacagacacagtactgccctgagctgcttgaggtttagagacacaaatgatattgtacaaaagagaaatgtagaacaactgcagaatggaggaggtgtatttcccctgtgtcccctttctcttgctatttactccacactctttgactcaatgaaggaaacgtacgtgaaatatataccttcatgtctgaataattttaaaacgttgagaagatttagacatttcaataattctcacaaaaatgtttaaacaattctacagatttagaattttagttcttgccagaaaactaattcaacttaattttggggatggttcttgaaaaaaacactattaaatactattgttaaatactattaaatactatttttaaatactattaagtatgggaaggaaatgcagaaggaatgagcagggcatttggggagaactgaaatcacttaatatttcaccagaacactcctttttaacatgttattaaacattttaacttgaaatcctatattttattatgtgtaaaccttgggttggaaacatcccctggaattagttgaaaaggtaaaaaaaatttatgcatagaaggagttacgtcttgctagagactcaaatgattatcaaattagtaaataaatgaataaattaattactacttgatttctttgccattaaatctcttttcctgtctttcctcctgtattcctcccttcaaaaataattgtcagttactatagcttcttctcccacccagttaaaaaatattttgttaacctttgcccatttggtggtctggacatttgctgttgttttctgtccagaatctcttctctcttctgttaaaagtattaatgtttcttgaagacctttcttccttcacaatcaggtcatgtgatttgattagagctgacctgcccccatgtttcaggtggttatgtcatgacccaggctcaatagatgaacatgtgacccacgctcactagatgaacatgtgacccacatctgtccaattacagtgaatctcagtacttttgctggtggtgtaggaagtatggaaggaagtcaaggatgaaggtggtataggtggtcttgtctgtccaccggcattgctaagaggagaagaaattggtctggggctgtagtgcactatcttgtcacctcgagttgtggtggtgaggtcctttttgaaaggagtccaccaagaaagtccatgatttcaagatgttctgaagacatcatctgagtttctagatgtaccggttcctgaaacaagatattggctattgagacaataaaatccccccggccccactttttttaatgcctgttgaattgggtttgctgtcaatttgccagaagggtttagacaaatgcatctcccccaaacacacacccacatctgtgttttagagaagagcataaatcagaaacagcagtgttttctagtacatctttctttgttcttactatcaactactaattttcttggtgtcttccttggtattttcatgtaaagtaaatgctgcatgaattactcaatgaattattatttttttctgtgaatagaacatgccagttatactttaggttattaatttgtaattgttagagccaggggttaaattgtgcaacagtcaagtccctccctcattaccatgctttggctgaatcctgtctccagagagaggaaatgtttctgttactctccctcttcctgaggaagcatgtctccagccttgcaaagtcatcaagactgaaaaaatcaccaccaggctgtgataacaggacagatccctcccatgctgcaaattatgctgtctccccactgaagccactcgcctctgtagtgtcctcatcactgagtgattggcttttcctgaaacaaacacacacagcatgtgctatacatgtagacaatcaggaaaacttcagaaaaaaaggaaagagaaaaggaaggtgtgttttatgttctactagtaataacatgatagcttttattacttctaactttatttcttcttggtttgactcactttcaggaggtgatgtggtgtgcaggccctgtggttttatcttgaatcctggctcttcggtttagcaaggatactatctgggcaaataactaatttctatgctgtattcccctatttgctaaaaagtattaatacatacctcatggtgatgtcagagttaaatgagataatatacctacagcacttaagacagtgtcttgaacatggcaagtactcgattaaggtcagctgatgtttagtagctggacagtttctctctttcctcctcacaccactcttccttctcccaacccaggttagacttatccctttctttgctaactataacaggtagctccccacagagtataatttgagaagcctcagaaagatgtctcttgtactaaaatatttatcctttagtccctgttgaaattttcctttcaaccacattctggaattaacattgaagttccctagtaaaatgcaaaagcatcagtcattatacactttgaatttatcaattgattcctagacatcagattctggggatatgaggcacaggaagaatcagtcagagaagacaggctaaaactcaggggtgtgttttgtctctgatttcagagctttaggagagatgagaatgggatgctaagagaaggagataacctacctggccaaccacattgccagattcaactggtgaatagtaggtgatggacgttaggatgagagttccatcacatctttgtgaaatgctgtggtggggagtccaagattgatgcccaagttggctgaaataaagctcctctaggtatcagttaggagtcattcaggagaacagaaactgatctaatctgaaaccagaaaaatttaaaacagagttggacacatagttgctggaacatctgcgacgccaaatagaagctgctaaagaaatacaaagatttgcaaaagcaggatgccattatctttcctgaggttagatgcataaagaaggaggtagtgtctctgaggctggaagctaagcccacctagcaaaagcaggagccttagctgcctctctgacaagaaccagagccatggagaaggcacagttgctacctgagacattgcctatgacagagaaggatgggggaaatgccctgtactctcctttctttctgctctttaacctcctgccagcatctctcattgggtgaatgtgggtggaagtcagctggtacagaagcctggaaaacagaggctgcaggacccacctccatggtaggcggcgcagtttaggagatgggactaagaatgacgtgagaacaatgaagcgatggtcacagtgctgagaaggtgaaggaaaactattatggtcaactaagtaggcgacattgaagaatttgaggtgtcaaaggtcctctttacgtttgccatattacgtttgccatacatgttgaggattttggcttagtttttagtctggacctagatgtagactattatacacctcacttccttagtttttctcaatggtagtcatggagtctgcattagaaacagttgtactggtagttcaacatgctaattcctgggcctcacatcaggtcttctgaatacattttccttattatggggtccactggtttggttatttctatgttattgagatttgtgtttatagtggtttttttttctatttaaaattgggacaatcactctccgagcaagctttgcttgttttctctctttgatgatgggtgatcctgttcttatgaagttctagtctattggcctgtttaatatccgcccaaaggttctgcccaggacttagactgctgatgagaaatgtctcttttccaaagattgatggtttaactcaagagaagggcaacacattctcaagcattttaacagatctcccatcccaggaacagagttgcacaattgaaaaagttagaaatagaaaccagaggaattccttggtgcaagaggtcagtgagatagacttcccagctggactgcatagcatgctgctcatggccttgggaagccatttcgggcatttgaagccaattgctttgcatttccttcaatgctgttgtaaacgattttatttttatagctataactggtggtgtaatgagcataggcctgagtcatagatgcttggatttagtattcctttggtgcataaggtaaggtctgtgtcctctccgaccctgtttctcatccttaaaatgagcatagttgctttgcttcccttgcagagtagttggaaaaatcacctatattaattgaatgatttctttattgagttcacccatgtactaggtctcatattagaaatataaagacagcattcttgtctttgacatgattgcaacttcttaaagataatttgtatttgaaagcagcctacactttgcaatgctctgttgagttgaaaattattatttaaaatactgtaataaagtcagatgggcttttcctaatggctacacttgcagttgaggtgggtagatattagttttctgcttaggggatctaagggacgatgtcaacatttttaacccgaggacctccagaaggcagtcaactatgctaagcttgctattggcaggcaaaagtcctcactaaggagaggaaaaagaaagagtaagaggaagaggattaaaagatgtgaaaataaaaaagactgggatgaaatgtaatgacaagtagtgtatagctaccaatgtccactgaagttactatttaaggcacctcctgccaaataatttcgtccctctgaagcattttatgaagtgtttacaactagaaattataaaaatgtgagcaaaaatctgtttttaaaacacctcccaaacttgcctttactgttttggaacttgtttcttcttactcataaattattgcttacatgtgttatttttgttttgttgtgtttttcttctgatggaatgataagctctcttttattttttcaacttgggatgacatgttgtactattcattaagcacttctaatattttacctgatgctttatttattttgtcacagttattttcaagctttaactgcatcagaattacctgggcagcttgttaaaacacatatgactgagccccacctccagagcttctgattctgtttctagtctgtgggatgtggtctaataacctcctatttgaacaaatgctgatcctgctggttcaggaggaaccacttctttaacatttcaataatattgttgaatatttcctcccttgggcctctattttcctgtgttgggttgtctctcttcttacagaatatagttattatagaacattttaatagaatctaatatggtaaatccatgggtttttgtgcatttcttatgcaggaagtttatattccaaaatatctgtgggaccctttcaatgaatggttctcttctcatgtaggccatggtctaggtaaacagagaggaaatgcttccatattcccaactcctgagttctaaaatagaaacatgatattgtggcttggacaggtacactaaatttatcacatcaatattgtaaagaatcatctctggtgctcaagagtaatcccaacagtgtagatatgatttctgttttggctcatatgagaagccctggcaagaggaggagaagtggatcgttggttgctggctttgcactgagttatgccacttttcagctgcatgactttttggcaaaatctaggattttgttacctcaattgtgaaatgggaaaaatgaccatttgccagatacatggagttgctgggaggttcaaggctgctaaatatgtaaattatgatggattcattggttgcttctcattaggtccaggtttgtcttcttttcctgctatgttgctttggactgagatgttgctgtctccattttggatgtagtgacagatgctgtgcaacatagaatggaaaatctccttccctggtgatctttacaagataaggcattatcacgtcataggaaaatctcccttcatcccttgaagctgtattaacgctgttggtttcatgagtttgtttaacatgcatgatgggtgagctgtcaaaatctctatcaagggcagaagtctcttattttggtacagaagcagatttgggcaaaagaaatataattacattttttctattgctttgtaggatctttgtcagtagctaactagatggacttgaagttaccaaaggagaattatagcagattatactgaatcagatgcattctcatagtagcgaacaattttttttctttttttttattactattatactttaagttttagggtacatgtgcacaacgtgcaggtttgttacatatgtatacatgtgccatgttggtgtgctgcacccattaactcatcatttagcattaggtatatctcctaatgctatccctcccccctccccccaccccaaaacagttcccggtgtctgatgttccccttcctgtgtccatgtgttctcattgttcaatttccacttatgagtgagaacatgtggtgtttggttttcttgtccttgtgatagtttgctgagaatgatggtttccagcttcatccatgtccctacaaaggacatgaactcatccttttttatggctgcatagtattccgtggtatatatatgccacattttcttaatccagtctatcattgttggacatttaggttggttccaagtctttgtttttgtgaatagtgctgcaataaacatacatgtgcatgtgtctttatagcagcatgatttataatcctttgggtacatacccagtaatgggatggctgggtcaaatggtatttctagttctagatccctgaggaatcgccacactgacttccacaatggttgaactaatttacagtcccaccaacagtgtaaaagtgttcctatttctccacatcctctccaggacctgttgtttcctgactttttaatgatcgccattctaactggtgtgagatggtatctcattgtggttttgatttgcgtttctctgatggccagtgatgatgagcattttttcatgtgttttttggctgcataaatgtcttcttttgagaagtgtctgttcatatccttcgcccactttttgatggagttgttaaaaacataaaatttgtattaaaatgtaactcagagaaaagatacacattatatttgtatttaatacaaatataaaatttgtattaaaatgtaactcagagaaaagacaacactaagcataataagtatatagcttgaagaattttcaaaactcaacacactcatgcaaccaacactcagaccaagaaacaatatcatcaccggaacccccccctcagtattctgtcctccagtcactactacccccttcccccaaaggtaaccactgttctgacttccagcaccataaactaattttgcctatgtttttaatctgacataaattaaataacatagaatgttatctttggtgtctgacttcatgcattaacatgtttgtaaagtacattcatgtcattttgtgtgggctgcaatccattcattgtaatagcttgatagtaattcattgtatcaataaaccacatttatttacccattagagtgtcatggccatttttgttattcttagttttggttattagaaatagtgctgctatgagcttttctgcacaagtctgtggtgaacatatccatgcattttgttggagtataactgctgagttttaagttgtacatacatttttatctttactggatgctgccaaacggctttccaaaatggtcataccatttacatgccaagcagccgtaaatcagattttcagtttcctccacattcttgtcgaaacttaatattgactatggttttattgtagccattttggtgggtaaggcaaaccaaaaataccattaaaatcagcacagaagtccccttgccccagtactgatgtttcattgcatcttaaggaaacttcttttatgggagtaatcaccacaggatggatagtttagtccatatctataaaggacttgaaacaatttaaaatgactcacagggcagctgcatcagggtaaagattaaacatttcagtacaggaagtagtctaggtttgtcattgattcatatcataaagttctttttcagggcagactgaacctggaaattcctcttcacccactaagttcagagggtgtcactctcttcagccgccataatgaagaatgtgtgcatgcatttgagagagtgaaagaaccagagactacagaggtcacagaacagtttataaccttgtagtatctgacatttcctgatacttggtgctagtagatcaaaatttaccgtgagtattgaaaaagcaaaatccttaaattatggcattgattgtatataaggagcagtagcaaggaccctggatattcaatcaatagtgcgtgtgtttgtgtgagcatatgtatatacataaaacatttactttgagaattaaaagtagctatttctctgtaattagtattgggaactgggtacaaaaaattgatcactctagtgagataggtgtgggagaaatagaacgaacaaattaaaaactgatgaagaaaatggtattcaagctgtcccaggagaaggatatttgtcttaggtatgactgactaaaggtttcaataattctccattgacataagttacaattaatgctatttttgtcatgttatattacagtcagtttccaatttccagaatcctcatgtgtcttttgggtactaaaggaacaacaactaaatttcactgtcactgcatcagttgtctattgctacagttatgctgtgtaacattcacaaaacctcagtcccatacagaaatgagcatttatagttaggttatgagtttgtggggttcggctgatctctgctagacttggcagattttagctgggcttatgtgcctttggtcatatttggcttgggtaggttactctgatgatcttggctggattgctcatatatctggaggttggctcatctaggatggccatagctgacataattgggagcaacttggcgccaccctaaaactcagtggcatacaacaataagcatttatttacttcataaagctgtgggtcagctggctggttcttctggtgttggctggtgtattaatcatctattgttgcatagcaaattacacaaacttagtgccttaaaacaatacacatttatatctgacactttctgtgggttaggaatctaggtaacagttagctgggttttatgcttctgggtcttaccaggctccagtcagtactggctaggctgtgcttttatctggagtttcaactggggaggggtctgcttcaaattcactctggttgttggcataattcagtttcctatagctgtagaatcgaggctctaagttcctaaaaccttccacattgcttttccttctgccacacgggcctctccacatttcatatgtggcttctttctttgaggcttgctggagtgtcagagccactctagtgaaatggtcttatataaataatgtaatcatatgagtgaaatcctatcacctttgccatattctgttgattagaaacaagtcacaggcctcacccacattcaagaggagaaggttgcataaactgatggaccccaggaagtaggaatcattgggagtcaccttcgggtctatctgcttcagctgggcttgctcacatgtcttgagatcagtgaactgactgcacatgtaggaaacatgttcacatggcaaacatagagatgacaagagtgacagtagtaaggcacaagtgatttttttcggctctctgcttgcatcccatctgataacatcccatttgccaaactacatcacacggttcagagacagagtgggaaaacagtgcaagattgcacggtaaatggtgtggatacacgaaaggtgaggaattcaggccatgaacacttcaactgggtaatccaaaaattcaacctatgtaaatctcatccccctcttcctctggcaagcatttctggaagaaccaagggtctcatttggtgtctcacacgtgctcacaaccctgggtgtttcccctgctctggcatcccttccaggccctctgctgccggcaaactcccatatagataggaactttcatgagctccctctgctacctttcatgaaaacattaatgtctggcagatgtgcttttcccaggactttagaagctaaataccctttctgtttcctaccagcagaggggagaatattgatcttactcactgtgtcctattcctcatctcatagaataatttatgaaatcattatctgctcatcaactcctctcttttcacgggtgaggccaaactcatagtatcctccccactcacccaccatgtattccaatacctgtagaactaaccaacctgtgttctctcctgatttaaagaatgctccagcacttattacaggtcagtgcctctcagtgctgagtgcacattagcgtcacccagggagctttaaaaaattcctatgcctgagatggatccaagaacaatctctgggaatcaattccagacattgacattttaaaaacttccccaaacagttctgatgcacaactgagattgagaactcctatgatacacagacatgtagaccagggtgtcttaaataacaattgcccttaggattttggaacttgaagcaggtagaaaaattcatttatatttgaccatggtaaaagcattgtcctcttcaaggaatttttcagtgagaagcctttagatacagatgaggcacatttgctttgagatatcttcttatccaacaccctggcaccacagagagcgaactcaaatcccatagggacttattcacttgtccagggtcatacaactaataaggcacaactaggactgggttccaaatctgtcatctttttccatcttcaacatcaatctattttcaaagcatggattcaaaataaaaattttggtcgtaaacagttaagttctataattttcccaatatacatgaaacaacagtttttgttgttgaccaagcttagaagcaggtccttcagaaattaatggaaaattccagaaaaaaaaatggaatgaagttttctgaggtaaaacttcaaaaaggttatctagtgcccttggctccaaagctttctgatcattctgacgattaagcattaagttttttttttaaatttttttaaatagaattttaaaacaagttttagaattacaggaaaatttaaaatatagtacaaagagttcccatatacctcttcacccagtttcctcctctattgcgatcttacattagtatggtatatttgttacaatgagtgaaccaatactgatacattctcattaattaaaatgcatagcttcttcatactgccttaggttttacctaatattaattttctctttttgaaaaaaataatttcaactcttattttagactcaggggtacacgttcaggtttgttacctggatatattgtgtgatgctgaggtttgggatatgattgatcctgttacccaggtactcagcatgatacccaagagtcagtttttcaaccctttcttccttcctgcctcccttctttagtagtccccagtgtctactgctgccatctttatgtccacgagtaccctctatttagctcccctttataagtgggaatatgtggtatctaattttctgtttttgtgtttatttgcttaggataatagcctccagctgcgtacatgttgctgcaaaggacatgattttgttggtttttttatggctgtgtagtattccatggtgtacatgtaccacattttctttaagcagtacgctcttgatgggtgcctggattgattccatgtctttgctattgtgaatagtgctaagcctcaagtcttgaagggtatactggaatgcctctgtgtactatttattattgaaaacgttggctgttttaattctaatttagatacgcagctgtttgggggacataaagaaatacatagtattatttgaagtcttcatgtgtatttaatgtctttaaagaaagcttctttaaagttgttaattcttgaggaaaggaaaaattcaggtatgtacaacatacatatagctccttgtgctatgtaaaatgtgggaaagtaaattctaaaactgtggatcacaagctgtaattagcaatctagagtgatgtactagctacgtcttttatttttggggtgctgatgctttgacatttggggcattgctgatcctggggtcactacccttccaagggtttgtcgattccaagaggcagtgaacaactcacctgttacacacctttcaaatgcaaaccaaccaattcagagcccccatccgacctgcctcctttgtctggctctcagactccaggccgctatccacctaatctccccagggccagggaccaaacaagtagggataacccccttaccccaaatcctgggggaattattcaatcctaagcctgcttacccttcctggcagttcctgcccatgggaaccacagtcaaggctctcgtccacatttctcccatctccctctgcctcctgagccacccagatctttcccatgtggccctgtccatggtgtggggtggccccttctcttggaaactgtgcagaatacactgtcttttcagtgccagtggtctcctgatctgttggccctgccttaccaaaacaacaataaaacctgtattaaaacaagtgagatataagagcttgcattcctaacatgttcctaggtgacggtgatgctgctcatcttggggacacactttgagtacaactttcctaaaacacttgaaggcagccatgttcttgtctgttagtgggagaaggagggtgagggacaaaatctgatggaggtgtcctctgggaacctacagaaaatagatatttttgtcaaagctgtttcatccacttaatcattatactgttgtgcttattaaatcattttaccacctatttgagtcctcctctgaaagccttgttattcttccatcctaatactagggtctttgttgaattacttgtgagagaattcaacaatacaaaaaggtggttaagaatattggttttaagtttggctgtggttctgtcaatgagttgtatgaccttgggaaattgtcaatgagttgcatgaccttgggaaattcatctcatatatctaggcctcagtctcctcttctgtaacttggcaataacagcaatacctatcttaatctatttatgctgctccaacaaaaataccttaaatgggatgctttataaacacaaatttatttctcacagttttggaggctgggaagtccaagatcaagttgccagcagattctgtgtgtggcaagggcccgctttctcatagccagcacctgcttgctgtgtcttcacatggtggaaggggtgagttagctctctggggtttcttttgtaaggccactgatctcattcatgaggacttggccctcaagacctcatcacctcccaaaggttctaccttgggagctagaatttcagcatatgaattttgaggaggatgcaaaacattcagtctgttacactacctcatagggttaatgttaggattaattgagctaagtgccaagaaaatacttaggaaggtccatggcacataattcgattttgaaatgttagctattgttattgaagttattttgggtataaaatgcaggattaccatcaatttcattgtcttgccatttatatgatataattttatgcctggagttttgaattgagaacaatggcatacaattaaaagaatctaaaaataagatccgactacatttgttattctacaaagcagaaaaccaaaatccacagatgaaagtttctgacattgttctctaagtgatgaaactacaagatcctgggatatgatcttattccaggattttatgtcagaagaaagttgtttttttccaggatatgcctcattttcagtcctgctgttggcaagcccaatgatgcaatgatgcacggtgtaatttctcccagggtggcacatgatcagagtagtggctgcacaaaaacggctcatccagtccaacgtgtcttttatgtgcctcacttttgaggcataccgattcccatggcagacaagttttacttgtaagcacgtggaggtagtctatcaggaggaaggaaaatcactatttcttcttttatgcccatcaccgacatcagtgacagatatgcttaattatagtatcctatttatttgtgaggaccaaagcagtaggaaaaaagtatttaaatttccagatacccagctgtgtcaagattaaatttagtcagttttgcatttatgtagcattttcaacaataaaatataagggacatctgattttctcataagctaaaagaattgccacaatttagctcaggggagaaagataatacatttcagtggtaaagacaggaagctgaagagtatttgaataacggggattgcgtgtgctgaacaagtcacgataggataactgagaatggtgtggaggggatttttacactgaatgggggttagggatgtgggtataaccaatgtctcccaaggttgaaggcagtgttttaaaaactgtggctgataacacacatatgggtcacaactagtgttttttagaaaaacaaataggaaagaacaagaaacatcagagtgcattacaatttgtaaaggtaagtgtgtgtgtgtatgtgtgtgtgtgtgtaatctgcaaaatacaacctgtttttttcagtgtgtcatggctaaaaaagagtttgaaaaatatagccttagttatttcttgaaatgatttatttgggatgctgacccagaccagagctaaataacattgaatcccaattgtgagatgcctttttgatcccttttccatctctttcctttcttctgattagatagacaatctccatttcctgctaatgcatctccatcgcctctctaactcttgtgagtctcccttttaaagggagagaagcaggcctcagccttggagtctagggcaggaagagtttctgcttattttctgttatgttctattggagcttctcatatacttcagtttccaaatttctatttccactttgtcccacgaagatttattgttttctttttcaatgacttgatttaagcaagaagaaattgatgggaaggaatattaaagagtacagctatggcaaacaatcctggcggtggtctggtactggcaggggaggggaggctgttggggcaggagtgggctcaagtgtctttggttgcatcaccttcccacaattctgggcagtctgatggccttgcccttgacaagcacaactggaggcctcttctttgagtagatcagactgattgccaagggcattttcagacttcccaggtgtcgcaggtgacaactgcattttctctacaaaaattaagaagacacaggtgaatatatcccaggaagtccccagtgctggcctctcaatgtggatatccagctaatgcactgatattttttaccagagacaatgattgggtcttggaactattcattttttcttagattgaccacaccatgctgattatatatatatattatacatatattatatataatatatatataatttatagatataatatataatatctataaattatatataatatataatatctataaattatatatataatatatattttcttatggttaagtattgcttcagcaggaatagaccaccaattggatgggaaaatcaaatggggtgataatgcagatcctgctagggacagataactgagctcacatgcccaggttcagcggccaccctgagatctggctacctggccttgccaggtctctatggaaaattatttagggcctttgtgtgcaggggaacctgagaaaactgagtgcagtctgaagcctgaagtgtaacaggccctgctctcctttgtgtgatggaagagcctaaaaataatacagaggtaacaggtgttaactcaggcattagttgtctttcctggaacagataacaccccttttaacaccaagagtaagtagctcagaagggtaaattgagcgttgcctttctcctgtctgagacttttctgtgtcaacccagggctaattttctctttcctccaattggcttggcccagtcattgctgtgatttcctcccctgacctccagagtgagaccaggagaggtgccaacatgcccatctgtgtgcttaacgaacttgctacttcatcactagagccaaagtgaccactcggtcccttcccctgtggtcatgggtagagtaggagccatgttggtctcttgtgtttcaagacttagcttccaccccaagctgtggtgttgtcttttcccaaaatccctccttgagcaacataatttgggaggcaatgctttgatcctgatggaagacaactttgtgaaagcaggttgcagattttgagggaaaggctcaaattgccctgggcatggctttgcatgcacttgcttgccaatttgagtagggaggaagtgcagccagaatgaattgcccgggcgatttatgcctttggcaagttgttcaagggcttgagagaaagaggagaggggaccaaaggctcccattacaacttaaaaatagccagccttgggctcctcctcttcctgctccaggctcctctgatcacagggagagctttgaaagggattcccctccccctgccccgtctccctctcccctccctcccttcttctactccatccatgacgccagttcatttgaatggcaagatttttctgagctgggataagcgagatacaggaaatcactattgaaagacttctttattcttggtgtcatcatcaccttagtatgagggacaaccagagggcccagtgacgaaagaggaggcctggaccagccaggatgtccaaggacccagaggtaatagaaatgaaactgattatccacagaggtcagcggccacagccgaggtggtgaacctcactttccagggtcacgtcaatgggactttacatcaaccctgaaacttcagagagttttagatactttgtcatattgctaatgacagtcatgatgggtggaggtggagggtgaaaactacagcactcttccccactctccccataaattcttgatgctttgttcacctatgtaaaccagaattatgtggtgacccaataagattttttagactgaatattaagcaagatctcccctaattttgagttgattgcactctgcgatcactgagctcaaacctgaagtgattctgtttataccaaggcttgttcaagatttggtttccaaaatgggtaggggaggctcctttcttacctactgggccactcaaaatgtttagattgctgagaatggagtaattgtccttttctgttactgaaacatctatgccacatatatttagatgagtggttcttaaggtgtgatatccaaatcagcaacatcagtatcagcattcacctggaaacttatttgaagtataatttctaaggttccaacccacaactttcatttattcatttattttttgagatggagtcactctgtcacccaggctggagtgcagtggatctatctcagcttactgcaacctccacctcctgggttcaagtgattctcatgcctcagcctcccgaatagctgggattacagaagtgcgccaccacacgtggctaatttttgtatttttagtagagatggggtttcaccgtgttggccagtctggtctcgaattcctgatctcaggtgattcgcccaccttagcctcccaaagcgctaggattacaggtgtgagccaccacacctggctcaacccacaacttttgaatcagaaactctggaggtgggcaccaggaatctgtatttttattctttaactttttatggaatctgtattttaacaaatcctccaggtgattctgatgcaggctcaagattgagaacttctgatttagataactcagaaaacagactgtgtttccttattgtagacttcatggtaaaactatagagactcaatagatgacttctatcaggcggccgaaatacttattttggagcttgaaacttttatgaaatgtcgccaatacagaaatgacatggacttgaatacaattatgaccaaccacatggaatcatgctcattgtcacaggattactttagaatgaatgcatgtgtgtatgttgcatcttactcccttcagtaacattcatttacaaattggagaaacatttctgactagagaaaagaactggtctcaggagattagaaagtagcaatttagaatttagaaaaatttcttaagaaccttctaagaagaaaagtgatcattttctgggaccagaaaatgggaccagaaaacaggataattttctgagaccagaaaacacttgctgtaagtcccattatagatggcatcattttgtgtttttatgttctgcaataaatgacagctaagctactagaatacactgggatgagaaaaattctctctctgctttgcaaggtttctcataaccttaaaataacatgcatttttcccccttgctcaggcaccattccccagtgttgcatggctgctcttagaaggaaataggttggatctgaatgaaaaaagaagggccagattctaagtgaagaggtaaatttaagagacatgtacttttggaaacatgagatctagggcacctatgagtttttgaaataaatcttttggtaacataatcaatgttttgtgtgttttcttaaaaaatttgcataatggactctccccataggacagtcccagtgtctccgaacagtgattgtaatcctgcatgcttggtcatgtgtggcttattaacctcaaatttcaaacccagagccagaagtggcagactgtggaaggcaccacgtggccaaaagcaagaccccagaataaaatgggccgtagctttgtacaccaaatgctgctcccacatagggcatctttgtgaaagcagtcattatttgcagagccaacacctgctaaccttttcagagactaatagaaaatggtttgggtggtcttgtagatctcattcttctctcctaactctcctatctcaaacagtttaatttcactagaagtacatgttttcatgtggttttcaatcactgtgaaggaaataaaagttatttttgaacttttttgaagcataaatcagggccatttatatccattattctcagtgttagaaacacacaaaatattttagttggcaatatgtctttttttcttaatagaattatgctgaggctaggacctcttttgaaacctgtttattttctatattatttcttttgccagtcagactttcttaagagcaaaggttgttacacttgggttttctgtgttgagaattcaatagggctgaataaatttgcggtctcctgatttgccagttcatatctagaacttgaccttttttttaatatcccatgttactgaagcagatttactaatataatctggaatttttactttcaggcctgaaagaaaccttagctctaacattgtagaaccttgtgattttacagatgtggaaactgaagtataaacatgttcactgaaagtcagacagggactcatgggaaaaaatacagaagcagacatgggaccccaaatctctatcttgttctattcccattatggccaatgctacaaacagtatttgacaatctagtagcaaataaagtaatgtgccatttccactttctggttcatttattgaagtttttctgcctactcctatcaatgcataaatcatggaagggagtccttaagactccaaaacccaagaacacaagtttatcattttttgaatttgtggattatttatttgacagtggctggccttgagaaaaatccttagctgaaaaagcatttttacattcctgagaaaataacttttcctttggtctagcattatttatctttccttttttataataaattttattatgtttattttgaaacgtacttttacaaggagagagaatattcttttaaaccctcacaatccacttcggattcaacaattactgagggcttgcaacacttgtttaatctattccttttcctctctgtttttttctgaattatttaaaagcaaattccaagtgtcattttatttcacccctacattccacattacacatctctaaagagttatggatattttgctgcataaacctaatgctattatcacacctaaaaattataattacaaggtcatccaacatccactcagtcttacgacgtcccctcattgcttcaacaaacatttttagagttgccttttctccattgttaatatgcatggctataggttcagggttgtgtcaaacattgcaaacttaaaaaggaaagaaagaaagaagatgaagaagtacacttatttagcgaggagggttttcccaaattctcacagctctaatctggataccattcagtgtgacaggcttctcactgggttcccacagctggttagtgttttgaattccagccccatgaactcatctcaggctacatgggctaatgctcagcggccaacctagagctcatatctctgatgacagaggactggagccagcacgggcactgtctgcctctttctaaatgcactgtcatctgtgttattcttccatctttgctaagagtgagtgactctaatgcctcttggatgcatttaagccattacggaagcaaaattaacgccattcaagcatattttgttgaaagaccaataaaataacctgccgcattgtggctgagccccagaatcctcagtcacacctcttcaaattcacatttctgtctcaaagttgagctttaagaaacacatatgaagataaaagggagatagaaagtataaatacatgttccataattagatatgtagttagtataggctctgaattttgattatgacttgcctatctagctcttaacagacacagtttcttagagcaaaggcaatcttgtgcttgggataaaggaaacatttgttctataagctcctctattggaaaacattataggccctttgttagatgcctaagggatagtattttaggggccccacttgaccttgccaaacatttactaggctagacagcacttattgaaagatgcctgaaatttgaatttaaaaaattcctaatgtaaatattttctcttctctgcatttgcatttatttataacaatgtgagtgagaataggttctgagaaggggtgggagaagaaagtatctatgctgaacattttttttttctttgagacagggtcttaatctggttgtccaggctggagtgtagtggtgcaatcttgcctcgctgcagcctcaacctcccagtcgcaggtggtcctaccacctcagcctcccgagtagcggggattacaggcatgtgccacaatgcccagctatttttttgtatttttagtagagatggggttttctatgttgcccaggctggtcttgaactcctggactcaagcaatccacccgccttggcctcccagagtgctgggattacaggcgtgagccaccacgtctggcctacgctgaacgttttggacatgggaagtgcatatattggaagagtaggtataaaacacttggtgcctatactaatagagctttacattctttctggggagtatgggccctaaatgtacaaacaaactcatgagaaatatgatcgctcatcttggaaagctgctgcaagaataatcctagacagtatctattggcagatacttaaagggtgtctgtggtggaagctactttacaaatggtttgacatttgaacaaaaaaaactgaatgagttaaagagcaaagcatgagcaggttgcaggaaaagtcctcaaggagggcacaaactgggcctagcagaggtaggtgaaggtgacatttgtgactggagcttgtatgtcgcagtcaggtcatgagggccttgtagctcgtagcagagagcttgatctcaggcctggatggcatgtatacagcaggtatatgaacatctcaacatggttggaattctcagactttagtgggtaccagaatcacttggagaacttgttacagctcagattgctggccctacgccgaaggtttctgactgagcaggcctggggtggggcctcagatcatacatctctaacatgttcctgggaggatgcctgtgctgctagcccaggggactgtactttgagaactattgctctaaggagcagctgcaggtgggtgtggcctttgtccatcctttgccgttaccgcagaaaagagaattacaggtagagcagtttaaatggcaggtgtgccaatgtgattgccacttacctatctttcctaagatgtcttgctttttttaatcccttctttagaatgaacctgaacctctgtttgacatacactccccaaaaggtagaatgagaaattctaaaggctatcaaatcacctcaccatgtcactgccttcagattcaccctgtccttaggggggctgcaggcgatggcagctgcagcacaggctgcaaacaagggctgctctcaacatttttaagtggaagagggcctgtctttccctgcgcccccatcctcctctcaatctggggctttctgaaaatgcactttatcttcccagacatttatgcaagagtaaaatgagttaacagaggccagtagcatcgctaagctccaaccaggaagtgttcagacgttaggaaacacgggtgagcaaatgtttactgactgtgtaattaatacgatgccttgccctgtctattggtccttagtaccatatttcctgttcaaggcagtggaaagtgaaaatattagttgctgtttgaccaaaggaacaagtgtcttccaaacgagcacatgatctattagcagtcctgccggttcttcccatgggaacaggcattttactttgttttacagctaatttctttcttacagcaggttcccagacacatcaaatgccttgcatttgaggctaaagtcaagatttatagtccaggcccatgtaattcagcgtcaaacaattctgataacataagggctggaagtcaaccattttctcatgagttcttattaaaaaaagtcattttagccaaattgagtttgaagggtgggtgtgtctctgtgagctaatggatgctacctacccatgtacccctgcaaagaagctggctactttcttttgctactgtagaaatgaaatatgaaaatggactaagtgatttctgattgatattattgttggctaacccagtggtagattttgttgctttttcctctgtggacttcagagggagaaaagaatcccaaacactttctcctctgatggtgcattgtatcttccctttccgtcctctatttcttttccctgaccttttattggctcatcatctctctgtgactcacacatcatgaggcttcattttcctactgaaaaaccaccacttgtgccaagagtaggttggaaaggagggtgtttcctttggtttttctttgtaggttcatgggtttgcagactcttggagatgaaaagatcttggggatcatttaaaacaagtctctattttacaggtgaagaggaagatggttgagtggtcccccttagaatgacacagccagctaaaagaaagaatgagggtatggtgatctctcgcccccacatatgatatcttgtgtgtttaaccagttgtgggacagggagacagagacaaggtctctctccctaacctagatgctttctaggttgtgatataattagctacttcttgacataggaagcttattcttcacatccttcaacagagatgattttctaccaagaatgcctcaaaactcttggggagagagttgatggagctcataatctgtggtgggtgtggggaaaacctgccttggggtttttgaagatgagtagaaagtgaaggaggaagctcagaattgctttaggacaccatgaaggcagtgggggtggggttcttcaccttccacactgcatagcatttgttctcttctcaaaatgcccagatgtggggaataaacagtaagcaaacttaacaaactataagaaactctaagacatggatttaattcctacagatttagatttttttcctctttggcataaaacaagccaaaatgcaataaatatgtacattctgtgaagaaatttggatcctagaggtcttgcagtttagtgtagaacaaagggaaagcagaactcaggccctggtgaagccatgcggccaatcatcccattgtgacggacacaatggcggccttgatgctaatgatgatgaaaacagagcttgaagtaggagaggcgaggccagttgcctctcaaacagtcatgtggacctagcctgaggtagtagccatagatgtcagtggcaagacagaagattcagtctctaaacaaaaccatgtgagcatcttttccacattgtttatgttggcataaagcagtactgctccaagtgtggtccaaggaccagcggcatcagtatcgcttggagacttgtgaggaatgtagattctcagggctaacttcagacctactgaatcagaatctcttggggctggagcccagaaatctgtctaaacaagctctcattatttcttgcttatcctaaagtttgagaagcattagcaaaaagatcttgtattatggatgcatgaatgcaagcttgtgaagtgggtgtgcatttgttgaaactatataggaggtcttgttgcttgagtgttaaagtctgttatttttttcctaagatacttggctatgaagctagctgaaataatggagggggattttacttttcctctttgttcagttgggaattgattgtaggaattgtcggttaattctaggtaattggattaaatccagaaggcacatgtatgtttctcagcataaaagactgactattgaggttttacaccatctctggatttagaaagtacaatgagagagaggaaatttaaaagtttccccattttgtagactaactgtggcctcctatagagaaaagagcacctgctttttccgctcctgaatcagctcctgatttcaaaacttggcttggacacttaaaaattgtatttccctggataagccatgtatcctctttcagattccatgtcttcatctataaaagtggaagaataatggcaaatgctatgtgaagatgaataacatcaggtgagatggtgtaaacaaaatatctaaaaccaagctcagcctgcggtaattctcacataatgaggtattatgattatggtgatgattgctatgatgaaaatgatattgattctgttacacaatcctgattaaggtcagaaggtaccagtatttcccttgatcatgtcttttagaggtattaagataaatgggattgaagtataacaaattcagcaaaggatacagatcctaagtgtgcagcaccatgactttcacaaagtgagagcaaatttgtggttaagaaacagaatgtggccagctccaaagttcccaagctcagattaccagagccactattctgactcctagcacctaagactagttacaaatcataatgtatgtgctcttttgtgtctgtctttttttgctgtgtgtgtgtgtgtgtgtgtgtgtgagcgcgcgtgcatgtttgtaattcatccatttttgtagcattttactgtagattattcattctcattgctagatggtattttattataggaatacatcacagattgtttattccattccataatgttttatccattgcaggtgtttgggttgtttccaggtctggctgttatgattaatgctccatggacatttttgaacatgtcgttggtgagcaagtgtgcatatatctgctagttatgtacctaggagtaaaatggttgggtcacaggataggcacgtgctcagttttaatcaatactgccagtttaccagggtggttgcacagatttacagtctcatcagcacaggatgaagcttctatttgctcttatttctaaccaacacttggcatagactccttgttctggtggcatacatgggatttcactggagtttgaattcacattttcatgatgaacaataaagttgggcaccttctgactgccatttaatttatcttcttttgggaagtgcacattctgattttttgtccattttttaaaaactgtgttatctttttcttattgatttgtaaactttttttatgtatgctgaaaatccatcttttgccaaatatattaattttaaattccttctctgactccgtgacttaccttttttcatcttggtaaaattgtcttggcttttcttagagttgccagaaaagtacaggactgttcattacatttgaatttcagctaaacaaaaaatggttattggtatgattatacctcaaatattatatgagagatctttatggtaagaatcattcattgtttatatgaagttcaaatgtaactttgagttcagtgtttttatttgccaaatctggtaaccctatccataagggtttttttttccttttttttcttttttttttttttgtcccctatttgaggacacaaaccttttcaagagtggcaacatcaagctctgagggaggacagggaggacagggaggatacttacttaaccaattagaacctctaagttttggagccccatctaacatgcactaaagcattttgaatcttgctttaaaaatgtcttaagctatatcttttgattaaactattctcaaacagttattactgggtaaatagtcttacaggtgtggctttcttcaactttgacttttttttaaattctgaaccatgagtttcagtgttcagtggcaagtgtaggttgaaatggaaagtgatgtagtgcctcagctgtcacctctgtttgtttccctcagacttttaaactgtttcctcaaagtcaagtttttattttcctctcctttcaagtcactaattcatgtccacagaaggagtgagtatcttgaaagtacagtaaaagcagctgttgctgtggctgctgtacatgatacagatgtagatgatacagatgttgaagatacggatgatgtagatgtagaaaaggtagattaagtagatttagaagatatagatgatgtagatacagataatgtaaatgtagacaatgtagatgatgtagatatagataatatagatgatttagatatagataatgtagacatagataatgtagatgttgtagataatgtagatgatacaggtgtagatgctatagatgatgtatatatagataatgtagatgatgtagatatagattatatagatgatgcagatgtagataatgtagataatgtagataatatagatgttgcagatgtagatgatgatgatgcagaggatttagatgatcagtagggatgattctgagaaagatgaatacctgtttgaagtatgaaggactaaggataccaaaataggggacttaagaaagaagagagaaatagaagatggttccattcaataaacattacttaagcaaaatatttcaattctctgccaagattaaaaataatcagagaatgaaataaaatttaagtttaaagtgaggaaatgaaacagaattgtcagaaactgaaaagaatttcacaggtcaaatggcaaaggtgaaaatatcgaagtcatgtaacaggaggaaaaaggatgcaaatccagctgaaagcagtatcagccatcagaaaatgcttggaaaaaaaaaaagaactgaacctggggttccgtctcaatttctgtataactgttaagacactgtctctttagttagcacccatatctattcatttttcccaggtctcattttcccaaatgtgaaatgaaggtattggtcctcacaattcaaagtgtggttcctggaaaagtagcattggcagtatcagggagcttgttagaagtgcagaatctggggactgtttccagatctgtggaatcagaatctctagggacaggacctagaaatctgtattttaacaagccctccaggtgattatgcagtattcagatgctggggaagaattggcctactctagtgcttttcaaattttaatgtgcatccgaatcagtgggacgtctttacactgagatgcaaaagacaaaactatttttgtatctattctatttgagtttgtgtttatgattttaagataaggctattctagaacaaatctacatagaaattggctttctgattattatccccgccatagcagaatgtgtgtagtattttttcccccaaatcatgaagtttgtgttagtacatgtgccagatgcacccactctgaaggggttgttaacagatacacacacacacacacacacacacacacacagagtttctgagtgaaagcaaggaagaacagatttctgagccagtagaggccacaaatgtcttggcccaagtgtagctcccaggcctgaggaatcccaaatgataccacagttaaataaggcaaaccccaggcccttagagttcaggctacgggaagtggcaagaagctcctggcaggcaacccccaggcctgaaggttgacttgggaatttaagtgcacaaactgtccagaaaattgtcatggtaggggaaggctggtctcttttctgtttgtgtttatgtattaaaattaagggatatgttgtacagggcaaaagaaaagggttggcttgatgttaggtgagaaagatctgtgttccaggccttgtaatggagggagagacgtgaatggagaaaaaaaaatggagcagaagctcattttgtcaatattaatgatgatgatgatgatgatgatgatatgtatattttgagcactttaagtgacagtcactttttcaaaacatcatgtatattatttagtccttgtagtagacttgagagctgggctttcttattaaatccattttagagatgaggaaacgaaggctataggtgggttaagtaatttacacaaagtcatacattgatgaaatgctgaaagcatgtaacaagccagagagtctaaccctaaagccagcatactctatatttcttgatgcctattggatcaaatatgggttggaatttttgtaacttggtgttgggtagtagaaagaatcagaaaagttgaaatggaaatattctctcctaactttaccactgattagatggatgtggtcggttgatggtaaaattggcaccaaatcttacttttctgtaacccattccttgtaatgtgatcttgcagcaactctcagaaagaagagtctatgtccctgtacacagaatctggcttgactttgcgacttgctttcaccaatcaaatgcagaagaagtgaagtctggtcctcaggaggttttgtactcctctgctgactctcctgggatgctaaaaacgccatgagtcctagttacgactaacttacatggcctagtcacctccattgtccaagccaataggtacccagccatcacacctagagtgaggccattccaatctccagctgatctgctgtggatgagcatggccaagatcaactgagcttggctcagatgagcaagactccctggataacctacaatcttgtaagtaataattttggttgttgttttaggggaggaagtttggggtagtttgttatatagcaagggataactgatacattgcatgatacaaggaaaaaccagttaaatggtacagaattctgatagaacagcacaggtgagaccaccctctgaacatttcataattcctctgttcttgtcttggtagagtgtgatcccctattcagctttatcaagaacttggagcccactttcttattattattatggatgtttatttggtgaatacaagaattaattgtcagggcccagcataatctgggacccatcatgtgaacatgttggcagactgccatgatggatcttgtccctatccctgaccttggcctcccattcatggtggggcttcctcccacctctcctgctttgtaaagagtattcagtaacacagcagtgtctgcatgtggtttccctctgtgaagctttaattagtggtgtcttgaatcttgattgcttcaggagtggccaatgagtttgactttccaaaatagatacccagagggtgtgaaacatgcttactcattagattcaagaaaagtgaagaagtctttatgtaaacagcccggaagatagtgcatttttggaaactcactatcacttttttaggcaggtaaatgattgcatgataatacataggttgctttctactgagggtgaactttctctagccattaataatgttaatttaaattctgggtgttaactatgaggtaggttcctttagttgctatgtgagaggctacggtttgctctgtctcctagaaagggaagaaaaaggatcccggttgtgttggtaactgcctcactgaaactctttgagtgtgccacatgtgtgtggtttagctggcgaccgtggtgtctgtatgtatgtggtcatagatttgttataacctcttgtctgccaaggcaagaccaccagttccattttaattctaagttaacctcaggctggagtcaatccatgctgcttgaacataaacgctgacactcgatcctctcatcctcttggccccacaatttgttgtttttctttttctttctttttttttcccaagggagtttgaacatttgtttgcaatccaaaaccaacacttcgtgtacaggacatagtgattacataattctttataggttcttatactttccatgtattgcaaatcttgctgctctgttataaaacatctcaaattaaagagcaatttgtaaaagacatacttggagctgggacattaagttttactgtggtaatcgttttgattcttttgagagatacagaatcaatactttaagtagaatcctctctttttaaagaatggcttgagagaggctgcctttcgctgtgtttttgaaatgggtaagacagacctctatgcccacatcctggcagtgcaaatgtaggtgacaagatgatattaagtgagaaacattgaattaactttttttagaaaatttaatttttgatgaaaggaaagaggaaattagtctgttaagcttttcaaacctgatagctaattggtttcatgcccatggctgtgagaagattgtcatctttaatttctaaatctgaatttaaatctcctaattcttaggcagcccaagcatttgtgaacttaacaaagagttgggaaatttttaccctaacaatggtttgtggcaagctcacatggtggcctatgtccattggttcgattacaaaagttacttgatttaaatatatttctatatttggagttgtagttgttctccaagactgcctgccctctttccagaaattttgcccagtgacttgttttcagaagtaaccagttagacactttgtgaaattgccaagggtgcctctcttagttactaaccaagtttcacaaacgctacattatcatgagttaaaaataatttcttttgagctggttgaagaagactgctaactgctgaaaatattgggagtgttatgggtgaccctaagaagagtgctgatgttttcagccaatcacatccaaatccctgctttttgaggtctaaatctagtccttgcaggaatcctctgaaatgggagacaggtgagatgtcaagagcataatggtagaaatacaacattgaactcatcagatgatctagttaagagctccaattccattaacatgctgccaacattccagcagctgcgaatatcatttaaccctatctaagcctcagtttcctcatctgtaaaatagggataataaatatccatttgattaatggactgtggtaaggattatattgataagctatgcctagtgtttcacatggcaccgttgcttaccgccctacttgctgttttcccatcctctgttgcagaatacagtccatacttcccaatatggcatgctgggccttctatggtctgcccttagcctaccttccagctaggtctctcaccaagctctctactgcacaggctctaattcctggccatgctatacaccaccatgcctcacgttccctttgctagaaatgccccattcatttccattcacaaggcaatttccactcttcctttaagaatcatctcaagcatcactttctctcagaagctttttctctaccgacgcatctctccttcatctcctccagcctttatactgctagccaaatgtccctacttttgccttagcactcacctattgtgtacaaacatgctactactgctgctagcattattcctctgactaattcacctctgcatctttctactttgctcacttcttgtgattcccaggctcatttagtttctttctttcaatcagtataaaaaaatgattatgtttgtttacattcaggttgggccaagaagacatatgtgcatagaaatctttgaactttgctgataagagaaagcctagaattccaagccaactccttcattgaatagatgaggaacataaagccaagagaaaatgataggcttgacaaagtcaaaataaccagacccagattgtctgacttccagcccaatagccttccaggagagcaacagacattgtgaggaacacaatgtcccctgtgacacaggacacaatgtcagaaatcagcacccattttccttctttggttaacagttatttggttttcttttgggaagtcatgcttgctcaacaataagtcctcttggtcccccagagggttacttccccagccctaagggtgtactcacaacccaggccagcttaattagcatgtcttatacccttgactatagccaatgggtttgtcaaaggcatgaaattcagcttggctcagtaaaactcaattccagaacttttgctagaattgtggtgaagactccgtgtgatcattagccataaagatggggtgaaccttggtctgttgggggtcaccatgtggaggtgcttagttgagagtgaagttagcagaaagagaggacagcccaagagagaaggaagtggagagagagaaagggaggaaaagaataagggcaggggaggatgagagagagcatgaaatccagatttgagtcgctggatccagctgtacttgaagcctgcaggaagtcctagaatttttagacacatgagccagtaattctctgctcaaatcaatttgattgggttttttattatttgtgactgaaagaattctgaattatacatgatctaactctcttccttgttgcacacttctagagagattcttaatacctaaattctagaattttcaagctctgctactcaaatgtcactacctctctgagccctggtttcttcagattttaattgaaaacaactactttgtttttggaaatttaaaataagatacacttggttaagtgccagcacaaactaggtggtcaattagaggtatttattatgatgattatgaatttgatgtatcacactttgagattcagatgccatagtgattctctctgtgtatgggggttgtttttaatttaacatgtatgattaaaattttaaagtcacttttcaggcgtgttatcaagatgtatccattagaacattaaacattaatatatttatgtagtgctgcctacctgtcaagcactcttctaagcattttgtaaatattaacttatttaatccttttaagaaattgaggaggtaatttctggtattgtttccattttacaggtggagaaatggaggcactcatggatcaagcattttcccagggccacatagttaatgtagcacttagaagactgggtatctttttcaatgccacatagtagcacagctaggagttgaaccaggcagtctggtgctacaggccatacattttgacatgtgttttgttgcctcttgacaaagtccatggactgtgatcctgggaccaacagcatcagtatcaactgggaacttcttagaaattcaaattcttggggctattccccaaatttctgagtcagaagctctggggatagggcccagcaagctatgtgttaacagactttttagatcaggggttccccccaactcccaggccaagaaccagtaccagtctgtggcctgttaggaaccaggctgcacagcaggaggtgagggcaggtgagcattactgcctgagccctgcctcctcctatcagatcagtggtgtcatggcattagattctcacaggatcaagaaccatattgtgaactgcacacacaagggatataggctgcatgctccttataagcatctaatgcctgatgacctgagctagaacaatttcatcctgaaaccacctcccccttcccccaaccccgtccgtgaaaaaattgtcttctatgaaactggcccctggtgccaaaaaggttgggggtggctgtttcagattattcttactcaggataaaatttgaggacacctgccctagctccttaaatttaagctataattcataaattgggttcttacggtgcattagaataatgcattgaataggtgatttttggatgactcctatgtgctaactaccattgtacttgtaggtgttaccatgcagaacaaaaggtaaagtattccttgggaaataaacagccaaataaagacttaaatacacacaagatctcagctatcacattcgataatttccagaaagaaaagaagtgtgataccagagcacatgacaagaagtgggtttgagggtgagaggtgggggtggtgtcatcaaagtctttcttaagtgaatgatgatgtataagaaaaagttgatggttctggacactggctgcacattgcagtctcttggggaggcctaaaaacctttaggccacatcccagaccaattgaaccggagagttgggtttggggcgcaggcatcagtatttatttatttatttatttatttatttatttgagatggagtctcactctgtcaccaggttggagtgcaatggtgcaatctcggttcactataacctctgcctctcaggttcaagcgattttcttgcctcagcctccccagtagctgggactacaggcgcctgccaccatgcgcagttaatttttgtatttttagtatagatggggtttcaccatgttggccaggatggtctcgatctcttgacctcgtgatccgccctcctcggcctcccaaagtgctgggattacaggcgtgagccgctgcacctggccagcatttttttaaatcacctcaagtgatatcagtttgcagcccaggtttaagactccctgaacttaaggctataggggagatatgcaggcctgatgaaagagtgacatgaaagaagttagtgtcagaacaaagtgtttgatagcacaaaaaagaccaagaagacaaaagatttgtgtatgtataatgcacttgtgtaatataatgtatttactacatgagtgaataaaacagattagcttttaatacatgctattaaaagataagctactaatacatgcatttagagaagaagaaatgttaggaaaatactagtggaaaataggatgtgaagagaggtgagttccttcctgtagaggagtttgccacttatgtaaaaaaactaatcaacatttatggagtgactactaagtgctctctagcagatgccatgaagacaatccttttctactctcagtagtctcaggtctgctgaggtaatgcttctaggaaaaacggttttgatttcaatataaaatcgtaacttgattatggttatatgcccacctatagatggaagatggaaaatccttgaaaaatgtactagtgaactggttctgctgataacttattttcaatactacttaagtaactatataattagtggaaaaaagaatattgtctgagactaaaatgtgaaatattaattgcatttttggtccctattgatagccgtctctgcatctacactcttggtaattgagactttgtggctgctcgtttgaagagatagaatctaattccctagccttgtctctggactggccttatgattctctttaaccatagaatgtgggagaagtgatgatgtgcctattctaagtctaggcctcaagaagtcttgaaagattctgttccctcttggttagtccactggaggatgagagacccacggcccaataacctccattgcctcggccaacagacagtcaacttccagtctcaccattgcctagactaccacagggaccacagacacataacggtgcccagccaagacaagaagaaacatccagctgagtccagcctaaattgctgatctgcagaattgtaagctagataaatagttgttgtttaaagacactacgttttgggatggtttgggatacaccactagctaataggtaaaataagatttaagaaactttaaaataatttaaaataaaactttaatacattttatgggatgattcaggagactccttctgaaaaataagccttgtggggacaatgctaactaaaaatacagtttctgaacacaaattgtactttattgcagcagttagcctctgctcttttattgtagtataattagtgtaatatcaaataaacctggttcaagccaagacagggaggtttctaagtaccaataagttgtctgtcttggtagaaatttaaaggaacatgttgagtttattattgtgtggcatgttatttatcagcaggagtgatttttgacaaagaggccccaacataaattttcattctattaaaaaataatcgcaaagtcctgctcccaatccaaggccacaaataatttaattaaagcctataaaacaggacacacaaaaaagtcactctgtttcctccactccacaacttgtatgtgtggcttacaatgcatttactttattatcagtcttgataaactctggggaagaaagccaggggtaacccacctaatcctttcatgaaatgtctctcacatgactttgagtttgtgggatcttttctcagacccccatgcctgagtgccttttgctgatggcccttccccatgagtgaggaagttgggtcactagttgaacactaggttcaagagagcatgagaatcatgcttgcagctgcagttagctgaggggctggtggagatcactgctccatgattctgtattctgagttctgccattttaatgatatctgtacatgttttctatctttgaagattcttggatttttacatatcagaatcccaaggctgagatataaaaattttaaaaattaaactctttgatttttaaaaccagttatttgctaagttcatgaaatatccattttcattaaatgaagaggtctatgtgtctgagaattgcattggttttctgtctgggggtatagtggttctccccctgtccacttctgccagttctgccagcattattctttctttaccccacagtgcaggctgaggggaacacctgctctgcactctgggtccaggaaaatatttcatagactcatgggaaagaccatgtcttatggcagaatggaggctaatttggaggttaggaaaccttgctctaattcttgctctgccacccgttactgaatgatcttggatagctcaccaattagcttctgtttcacctatagaaggaaaatgtgggagttgacaacctcttatatttctttatagctacttattatggcaataattggtcagcattggaagacatggccactatatctatgattttcactgattttatttcaagagctaaaatagcctaaagaaccttaggattgcctcctgccctggctcgattagccacctttaaggctttgaactcaaaaagtccttaatgccttggggttcatgtccaggtgatatttgcaaatgaatatcaatcctgaaataatttagaggtattttcatttaacatgtttaaagtgaaattttttttttgcttaaaatggtatgcttcaattatgtggaatttttaattatagagacttgaaataattcatgtgattcactagtcctggaacttcttatcaaaggatagtgggccttttaccaactccattaggctatctctacagaaacacatcctcatgtgaaggtttagtcaaagagttttgttgttatccagagcatgctgccctttaaagagaagaaagctttcctttttgggaaaagacttctctgatcaattttggctgaggcttaagcaatgatttatgggtttcagttgacccatttgttatttatctaggcaaaatgagttttctattgattgaatgtctcccctgattacgtttaatctttggagtgggatctaaggatggaagaaagagacattcatgataaatgtagctttttttccctaggaaaacttgggaggaagacatactataccacatggtcctttcctttttctgtggatggcaaaaagatgcatcacttcccggagcttatgatagaagatgctccttcgccagtgtgagacacttaaaaggacaatgatttgtgcagggaactaaccctgtgtgctacgtgtccttttgctccattttactgatgtgacaattggagcagaatagtttatgtggcaaattttcccagcatttatttgcactgcttactacattcacattctagtttacaaatcttgacaaagacaactgaataggtgttttgcatgaatgtacttattttgtattgaagtatgacacacatgcagagaagtgacattgtcataagcaaatggcttgatggcttttacaaactgaatgtatgtataaccaacatcgagaactagaagcagctttttcagcccctccttcctgaaacttttcctctccttccaccttgaccaagtgtaatctctctcctgacctctggcagaataggttagttttgcttatttttatttttatatgaggtgaatctctagtgtctgggttcttttcctgaaagctgtgtttatggaattcatccatatcattgtatgtggttatagattctcattgctgtgtagtagttcaatggcatgaatatacactaatcatttatccgttccactgttgatgtgcaattggagaatttccaatttagagctattatgaataatgctgctagagccattctaatgcatatcttccagtgaacacatatacgcagttctcttgggaatattcctaagtgtggaattgctgggtcgtagatgtacatttttaaaaatcataatattagagtcgagtatgcagaattgactgaattctaaaaccaaaagctaattttttgaagtgtgaatttctgtttggggaaagtgaataatgtgaagaaacataacatttttatttatggaaataaatttcatgtcctctgagctaacatcgcccgttcttacgtctgaatggcaggatgttgagtgtgctgacgcggtcattttctgcggggctgctcccagcttagcattcttgccacataaactcttctagcccaaaccttgaaatactgcaggaagtggcatcagcccttttgtgttcttttccggcaccaggttgctcatctctccctgtgcccatttgaggtaatatactgacagttgtcaagatgagtcatggctctttctcagacacacagggagaccaagtttgtgactaatcgacaaatcctctggacacaggctgagccaccaagagccaccctcgtcccggcaagttcaggcctgggctgcaacctctgacagccagaggggaaagcaaacattggcagaacagttctgtttatttgcttctctgattttgaagacatgcagctttctctcactcttctccatttcctctaaaaaattttattaatcttagcttatttatggcctttagcgtttgtctgcctgttcatgcatgtgctcagaatctaaggagtatgggcatgaatagaggcctcaggggagatgtgggctcaagccaagtccaagtggcctttgagcattgctgtcttcctggccacctttcactccctatgactcctctgactcctttgcacagatgtcattggattaatataaagcaggacttgaaaacaataaagagaaataagacgtgaacaagaaggataagatgagtttttaagtggtaggtactgattatctgcatagatgtttcaggtctcctgagatttttctggaaaccattttcccaactgtcccaagttagttttcagacattgctctagagttgtgtgtgtatgtgtgttagtacaatgtcagcactaggttttgcaatcacatatgtgctgctagttctgtagcatctccatggaactagcccttgcaattataacaaagtctgatattggttggctacaagtaggtattgccttgtgtatgagttgggtgatattttgaatccctggaattgtcctcttcactttgcaacatccactcactcagaaaaagccttgcatcccttgcctgaagggtggaagaggtgggggtttaaattagtttcaagggactggacaatttcattctcacctactgaaagcaccatgtttgttgaagagaaactttcagagtaggctcaattaagcccagacagtttgatttaacttgtttttaattgtaatgggttattttttctggcacggagccacccagaatttcatctgtgagttccccagataatctccatctactttcacaattttctcagcaatattcagaattcccactacagtgggaccttctcccctcccctgtttttgtattctttacatcattcaagggtttggagattagaaggcatcctcttggtgaattgtggctgggagagggggtttctgcaggaatactcttcacaaatctacagtctgtcttcagaggccaaacttgtttcttgtagaactagaagtctccaacaatggcaggcccccttcctatattcagcaattccttctgtgtctcaaaatcagggagttattgcctaatctttattacaaagaagggcctgttaccatctcggttggaaagaggaggaatggaggagttagtgttagggaaaccagtgcccattaacctaccacggtggtttgtaaagtgtggtccctggatcagcaacataagcatcacttgaggacctctgagagaagcacacttactgaaccagaaattctggggctgggcttttaacaggttttaacaagccttccaggtaattctcaaacaggctacagtttgggatcaacttctttcatcaaagattgcttttgccagtcttaaatagtaagactgtaaattttggaagaagtatctctgggtttttcttcttcttctttttttctccattttcttctgtttttcagtggtggtaacttgtactgcaagacaacaggtataaaaaaaacccatgtgaaatattagctgcaatttctttaagcctgggctctctttttcccagtggaagacagaagagctactgcaaaatatattgaatgtttatcccctcaccttgtatatatttgaaaaacgattaagtctctaatcttaagtttctgaactgaatgccttccagaccaggctatctctctgtcttgatttttctgaataaagttattaactgccttttttgatgtattcttttgcacggtggcttcaaaatagtgttttggttttctttcctttccttttgtttttttctggaaatttctcccaagggattcttaattatggacctctgttgagtatatatgataacacaaaactctggttatggctggaaagcatagaattcagaagaaggctgtcttaccactgctacaccaacaagtcgagataggtgttccacagtttgtccattacaggataaatagagaatggaagggctcacttcctgaaacctcagttgatgtctaacatagtgcgggaaggagaagtcatggagcaacaaatcatccattgttcatttccttgtcaaagttctggaaagctttggtgactacccatttaattatgagatttaaaatcaccttattaaagtataatttatatacaataaaatattaaatattaaatatagagtttgatgagcttgatggatgtatacaactgtctcacaaattacaatatataacattaattattattattattatttagatacaggttctcactctgtcacccaggctggaatacagtggtatgaccacagctccttgtaacctcaaactcctgggctcaatcaatcctcgcacctcagcctcccaaagtactgagattacaggtgtgagccaccgtgccctcccataatatatgatatttttatcagccagaaacttcccggatgttcctttgtagccagccccccatccctgccctatgcagccactgatttgatatctagcactacagattaaccctccttctcctagaacttcatacaaatggaatcaaacaacttttatgtttatgttgacttctttcactcaacgtaatataaatatccaaacttatgccccaggctaacattttcttttcttttttttttcatttttaattaactttgaagttccagagtatatgtgcagatttactatgtaggtaaaccagtgtcatgggggtttgtcatacagattattttgtcaccccagggattaagcctagtatccactggaaaccacaggacactttgaaactccttcaggacagaggtaattcacctgctgtgttgcatatatcagtattttgctcttttacattactctgtagtattctattatatgaatatatccaattttctgttgacagatatttgggttgttctcagttttttagcttttatcaattaggcttctatgaacatttatgtataaatctctttatggacatatgttttaatttcttttgagcaaatgcctgagggtgaaattgcttagctatgtttaactttgtaggcaacggccaattgttttccagagttgttgttcaccgaaaatctatgagggttttagttgttccacctgcttgccaacacacacagaccataagtctttaattttagccacttaagtaagtttatgtgtcatctcattgagagatggttaatttaaaaaaacctcctatcctcttgtgggtttccttgctggtaattctaacaaggggaccaatcagcttagagtataacgtagagatgtataaaatcttccggtatgaaattgacagagatcactaggtcatgtgcacagctgattaactatcgacctgtgatcacactgggaacttgagggcatcgcttgtgccctcttttttggaaatttaatctgactgaatattttctctttgaatatttaaatttctttaaagaagttaacaattaaaggaaggcattgtgttagtttcctatggctgctgtaacaaattaccacgcacatgtggcttaaagcaacagaaattccatttttaatttaatcgtctttttaaaaattatttatttattttttaaacttttatcttaggtttgggggtgcacatgcaggtttgttacataggtaaacttgtgtcatgggggtttgttgtatatattagttcgtcactcaggtactaaacctagtacccatcagttatttttcctgatcctctccctcctctcaccctccaccctcaagcaggccccagtgtctattgtttcccactttgcatccatgtgttctcatcatttagctcccacttataagtgagaacatgtgatatttggttttctgttcctgcattagtttgctaaggatggcttctaactccattcatgctcctgcaaaggacatgattttattcttttttattactgcatagtattccatgataaaacaacagaaatgtattctgctgcaattctggaggccagaagtccaaaatcagcttctcggggttaaagtcaaggtgtgtacagggctgtgttcactccagaggctctaagagagaagccattctttgcctcttccaacttctggtggctgctggcatttcttggattgtggctgcatcccaccaagatgttcctctgtcttcacattgttccgtcttctgtgtgtagtgtaaactcacctctgcctttctcttataagagcacttgtactcatatctaggtcctacctggaaaatccaggataatctctctgtgcccaaatccttaatttaatcacatccacaaagactctttttccaaataaggtaagatttatgggctccaacggttaggacctgatatcttgggagtggggatttttcagccttctacaggcattcagccttaaagatagttgtgtctgaagttgaagttcttgtttccttttgaggaaggatgtttggaagaatttaaaacaatatataaatgcacaaattccatgaactatttctgcaggttcctatgatcttctggaatccatccataaataccagaaataaaatgccatgaggaggagaaatagagcacaaaccccaggtccactaaacagtattatttgttcataattctgtctttcctctagcccttatcatggatttcctgtaggtagaatgttctttccccctgttgagtttaggtttggccatatgacttgcattggtcagaagaatttaagcagaagtgatagtatgccagttagcagctagggcctgaaatggttttgcaggtttccatcagtcctcttggagctctggtctctaccatgagttaccagatcttgcttccagtagtcgttgttccttctgcctggatcctggaaacaagacttatacctgacccaaagttggaagtctagtctggcgccgagaagcccaactaactccttctgaagcaagcttacctgcagatccatgagcatgaattaaatgcctgtttttataagccactgtgatttttgtttttttgtcaggtagcattaacacagcaaaagctgactgatacatcgtatatgaatctctgtctatcaacttttctattctggcaagctgtattgagcagtgcagaaggaaacctcagagtgttcattactttcctttccctaaaatcctagaccaccggttaagcagtcagctcctcatttgttttttcatattgcttttagaaaattagtcaaaagggttttctacactgaaggcactctagtcctaaggaaaatcccaaatcatgatattctaagtggttctcaacatctaatggcttataactccaaaaaggaaaataagcaaaacaagcagctattttctctcacttaagagtgaaccacaatttcacaatatcacaaaggaaggggaggaagtccgccatctttttcctggaatctggggaaacatttgtctttccttgttctatttttctgctagatgctgatttcaagcccctttcgaaaggaggtagagggcaggtaggaagaattgagggctcaaatcctgggttgaacattggtaagataggcaactaccaaacttccctcatgaattccataatattgactgcactttagtttcatccttaggcaaaatttcatcgtgtgcaatgtaaatatttgcaaaatctgtgttggtttgtggttaattatggtataaacaaaacaaaacccacaaaaatcaaacaaacataaaaccccagtatacctcctctcccaatttcacctgttaatcaccattatttaattaataccagttttctgtaggcactcttatcaagttatagccaaagagaaatgtttattaccactaaaattccattatgtgagaatttttctttaaatattttttgttcaatattagaaaagcaaagatattgggaatttaccattgtctcaaatgaataatcttccctgagtccagtattacggtctcactaccccataaaattagcaaatcatgcttggggaaaatataaagaactgttgatataaaggaagctccaaaattcagtggtgctggtagcattatagatagaaaattggtgatttgggaggatgacatgccttagacatgacagcttgtatgttcccctttatgaggtgggtggggaaatagggtgtctattatgtcaaactaccctcacctgcaacagcgaaggtctgaactttgttcagctggatatatttaatgccattaaaatgtaacagatacgaaagtggttctgtctcatccatttaaagtttccaacataaattactactttgcatggtacacttaaaggcaggtctgttttgtgtcaatgctaaatgaaaatggaaaaataaagccagagaagaggctaaagttcactgatgcagtaaaaagtgaaaaggaaagcaaaacgacgttccattttctgaaaggctaccagccctgcctttgatgttgagattgttcaattaccacggaacgtgaaagatgttctgtaatcattaaattgtcatttcccccccatcctgaatattgtagtgcatttcctgtcttagtgaagcaagataaattaggttcaggcgtttccctggaaagggcacctctcattccatgtgatgctgaccttttttcctttctaatgaatactgtcttaaagtcctttttaccaactgatgtgtccctgtctcagaatggtatacccatttttatgcctttgttagttttaatcccttctaagacatcatcttttctttagtatttaagtatagttagatgctatttcatgctgcatttaaagtgatggagactcttcgcagcatatgcttgtttcggatgagagggaataatcctaaaacttcagttattttaaagcacccgctttgttggacgtacgatctatagacagcagaaagaaaagtggacttggtaatggttattggttggctctcagattcttcttcttgcctattaaacacattatgccaagaacaagtcccaggactattagccttgctccgaacattcctgtgcacacatgttaaacacaggcaaatgaggctcagcgaggtagcccagtctggaggagccagttctgcagtatgaggtccacatgctaattctgttccatctggtttcgtccacctctcaaagtgtattttacttgattacaaaacagtcacggtcaaaattgtttgtagttatttgcaataattaataataataatagcagctacctattaatggatgaatgcttacttcaggtacctaatactaagcaccttaaatgtcacaattctttccaaagttgagacaaacattttctttttcttttttgtgacggagtttcgctcttgttgcccaggctggagtgcaatggcacgatctcagctcatcgcaacctctgcctcccaggttcaagcaattctcctgcctcagcctcctgagtagctgggattacaggcatgtaccaccatgcccggctaattttgtatttttagtagagacggggtttctccatgttgaggctggtgttgagctcccgacctcaggtgatccacccgcctcggcctcccaaagtactgggattacaggcgtgagccactgcgcctggaccaaatattttcatattaaaggttctgtagttgttttaacatgcattagaaaagtttttattttaaaaagtcataactttattttaattagactaggaaaaaatgttatgttttaagcccatgatttcatggatattattgtttgtgaggcaaggataaaggagaagagggagtgaatttaaggttgacacatgactgtttttctcttgaaactcctgctgtggcagacccgcccacagctttcctgggggcacctcttctttctccccagttttcagtggttgataatttctgagtttcctcaatatcttctgttggcttctccaccatctgttgacaaaagctctgtaagaaattcccttattgtaaatatgtaaagtgatttctgttttcttgcttagactctgcctgacacaagttggtaggttgaccatatctttatgaaagggtaacaaaactgacgtttgatgaagcttagcaacttgctcaggatcttacaacaaacaggtgatggaactagaattaaaatctagttctttttgactcaagagcctatcttcttgattcctgctcttctgcataccttaattgacttcacagacttgcctgatgttagacgtttgcataaatggccaatatgacctaaaatgtacctctccctgaacaatatttcttcactggcaagcagagctgctccccaggaacctggtctctgctcagcttgccccaactggatcaactaaccatttcatctggctggtgcttaggcaattgttcaattattcagaagattcttacaattttagatctggagggatcctgcaatgatctcgactgcatcttgcagaataccagcagaaaagagatggcaaagtcaaatcgggataattcaaggagcaggtggcagattgtatttagcaaagacggccacactatgcgtatatcaacatcctatgctcccattataatgtggtttgcatttccccatcaacaggaaggttctgtattctctcccatgaacctcggtgaattaactgccttgatgaatagaatgcagaagttaagctccatcaattcagaggtgatgccataaaagccagtgtgacattctctctctccctctctctctcccccccaccccccatctctctcttttggtgtatgtgattgctttggggaaagccaggcaccacactcaaaaaaccccacagagaaatccctatggagagaaactgaagccgcaatcaatagccagcacctacttgcccatgtgagtgagtgaactgccatggaagtgcatcctacatccaaatgactgaagccccagccaacatatacctgcaaccacatgagagaccctaagcaaaaatttcctagccaaacatttcctaaattcttgatcatcaggaactgtgagaactaacacataattattattataagccactatatttcaggatgaattgttatgctgtgatagataactaaacagatgatttaataaaaggattatataaagggctgacaataccgacaaggggtggtacagtatcttggagcttctagtaaccaggctgctatcactcctagaccttagaagcacaaggctgtggagacaggttcacctgagagaagcagtgacctctggtcaagggttgcagccagcccaaggtggtcccccaggtaaacaactgggagaataaatgcctcaacctcactaccctcttccttcaggtctttggttgaggggcttcaccttggccattggccagatccaaccatcagaggatgattagactttattaagtagagacactgggagagttgataggttcaacaggaaatacatgcaaggaagaagcaggctttcaacaagatatgccttctggtaactctcatattatctctagcttcagtctcactagacaacccagtgctgtcattctgtaatcctacctgcactggccagccagggcactgccagctgtcacattcaacatctcttttctgtgaactgtcaacagagagaattatattagttagagaactctaatccattaaaagatgccagagaggactttattagccaagatgtaaaacatccaatgaactaaaggatgaatttcagtttctccctcttcaggttctatattgacaaatccttcctgtgacctttcatccttcttctctagctacttttctcgttcactccttcttctaccaataatctgtattggtcatctccattttctcaccataccctcactctttaaatgcctaatgagcatgatgttccagcaagtcaaacttcatgaatcactgcacttttaatcccctgatgtatctaaatctatccgaattcctctccatcttcttttcactcactgtctagataataaatgagagccatcagtaaatttactaacttggttctatgttcttttaaaaacatgattagaacttagggctttgattctgagtaagttgatatgaaatctcattaggagacataatactaaataatgcatggggttgggcaaaattttgatctcatagaaaccctctttctccttaaatgacaatcaccatcttttattcattatttagtatcccaaaggaaatacaaaatttaatcaatgaccaaatatctcccctattttaagtgttagcttttactctcctcagaatacatcttatttagaaaaaaatcttatacattattaatcatgttggccaaaaagaagcctgtttatatatttgcaacagatgccatagatgttaatagacattcatctgcatttatgatacaagaagaaggctatggctcaaagatataggtacatagaagtttaactacgggtatgccactagtcagtggcagagatgtaatgactttcttgcctcgccaagatttccagttcaatgttatttcacattagactgttttttttgtcctaaaaattgtgtggttttctagaccgataaaacaaacaactgttttgataaacttaaacatgcttcaaagaaaaattgttttcctgtagaggacacagcgtttggcacacagtaggtattcactagttatttggagaatgaatcaagtgacaggaaccttccagataaattcaatcagttctgcttcctttttcttcaagtcttcattgtgcaatgttatcctcaattcaaccctaaatctattttcccagaagcagtgagtggttttctacaagtatgctatttctgggatcttgtttggctccagtatcttttttttttttttaagagtcttgactttccagatttgaggagcagctgcttttttgaataatatacaggactacacatgctttttctgcctgtttctttcctctgaaccccggagggattgacatcaaggattgtgattaatggtatttgagtatttcccttgcccttctccacacttttgtactacgagcatctttctttagaaacattcatctccatctatgtcttggtttctcatgtgtttttctttgcaatgagaacctccttagaaagctcccctttctactcctttgccctatttcctgttatttcatcattgaatatgattcccttctcttctgcccatttcaatatattgatcgttattttaccctcctatgtaagaaaatgaaatttgttgatagtccactataagccaagtagtgctgtaggcttttccatatattatctctattaattcatgcagtcttctgagttcagcaacattatttctgtttttcacaggggaaattagaggtgcactgttgtcaagtaattgcccagatctacacattgtagcaggcttatccaattcttgatttcctcccacatctatgtctagtgatattgaaggcatgcaatgttttgtttgccactttggaattgacagtaccatcactgttttcattcatctaattgggaagtaggtcagttagaaagtggagctagaaatgctgaagggagaaggagaaatagaaaaaagaacaaaaggtcaaatttttaatcattcctttaacctcaagacaattctgcatagagtgtctctcaacttccagtgagtaagttcaaagactttactactctcttctttacccaacccaccccttctcactcccagtaggtgacctcacctcatattctcctaccaaaatagagtgatattaggcatcttcctgactctcagcaaaagatcagtgtatatttccccttctttggacaaataaggctctctatttatctggccatacgatcatttcctttccttcccagttaaactacttgccaaagagcctcaattccttcttcctcatcttgtgggcacttctcaccaccccctatcctaaggtctgacttggctctgcctctccactgctgctaaacttatcataataacagttatccccagcttctgtatggcccctttcatctttctgtagcacttgacattatttaacattccatctttgtaactctttaatttctaggtctccctggcatttgcaacacctggttcttctctcagattttagtatgggcttattatctgcacaagacccttattagttgaatctctccaaagttctggtcttcaacctctttccctagtagaactcactgtcatggttcaaccaccacctcaaaataataactgacccctcttttgtactttaggtttatatatggtaataattatttgacatttcctcttgaacactcaacacatccctcaattctctgtcttcccccaacccattacagacctttacttcttttggtaatctctttttcagttaatggtatcactgtttatccagttacagaaaccaaacaccaaggtgctacttgtaaatctctgtccttcttatcgattccatcacatcttgtcaaatcagtctcctagtcctcactagtctgtcttcaaatactacttgaacctgccccttctactccatttcacaccatttctcaccagtagcataacaaaagccatcaagcttatctttctgcctccatttcccctttctgttatatctcttcttgccagagtaaactatataaaaagtaaaaagtgggcatgtctcctgcttatcattcttcagtggcttcacctcatagacatctaaaattgcagatgcatagcacactctaaaagggtgcccctggcctggccctgaccacctttccagcagcattgaccatatgctctccaaagcctcctcgctccttcctttctcacccttgaagctcttgtgctaactcttcctttggtggaaatgaccttttttcgttttcttttttctctcctttcacctgcccaagtcatctctatttttgaagagtcaactcaggagtaatttcctccatgaagttcctcccaaatccccaatcaaggctgggagtgtctatcagtatacctggccctaaggaggagctcaataaatgtgtgctgaactcttctcaagcttctgaccgcaccacacctctttattcttactttaatctcctaatgatacaggacatagaaagaaattatttaggaagatagtgagggtaagagagttcttggtaaggtttcccttttaacaaaaagcagccccaaattatttcttttctaacaaagagctgcctgtaaaatcgagctacagaaatagataagcaagctggaagcttgcacaggtgaatgccagcagctgtgccaataactacctgagagctaggcacattcaacatagaggctccattttcccttttctttgtcaaccacgtgtacagtaaaggaacaggcaatgtggtgccggccaggtagagaacccatctgcattataaaatattagggtggggctgccagcttcttcaggcactatgcaaacggcacacctggtccaaccaatctttgggccttatgtaaatcagacactgcctcttcaagctcatctataaaaccccatgcatttcaccacaaaatcagaagatccactcgggagcccctctttctctgcaagagagagagctattctctttttctctttcttttgcctattaaatccctgctcttaaagtcacttcttgtgtgcccgcatcctccatttccctggcatgggacaacaaacctcaggtatttatcccaaacaacgatgccggtatactaatttaaagagaatatgaaaattttaagataagaatttcttcatctcccctgatatcaatcaattctttcttcatctgcctacatcatctccttcttcccttctgttatactaaagttacctcaaagagaaactaagtaacttgaacaattgtagcagctgcattaataaccacataaatatcaaacgttagaaggaaagggagagataggaggcattgttaatgacctaaagtaccatgtttaaattagagagttaattgatggcataaagaaatagaataagcataatttttagatagttatgtgggggatctttagaagaatcagaattagaaatgaagatatacctttggggaatggtagatgagatatgaaagggagattggataatttctctaatggtgtatttattcccattataagtgttactttgctgccaaggctgtgtaatctaagataggcaacttaaaaaaaggagtattaatacttatctgtaagggatgttataattcaatgagttaataaatatctcaaggtgctttctaatttttagagtgcagttcaacttttattaagtgagagttttggatgctctcatgtaaaataataatgtgaattgctttcctggacactatctactttaaaatcaatttctctttctaatgtttgtcagtatgtgaatggccaggacaaattggttttgcttaatccacacaacatgtcatcaacaaagtaaaatcgactaaaagtaaagtcatcaattacattcaccattggtgcagtaaagatagtttatttaaaagttatttgatagactttttacaaggtttctactttttataagagactatggaagtctgaggaatgcttcaagaaaagagagagcttctcccctgaaggggctcaatacactgacaattgactgtctctgtgaaaagcatttgaaatgaatccagggatgtgactgaaaaattttagtacccaaatacttattaatgaaatattgtcttcatattgagtcaggagatactgatgtcacagtacagaatgttgtgagagttttctttaaatttaattttaattgatttttataagcgtgacttgatgtctccaaaaaagaaaaggaaatgtattaagtccccaaaacattttagttcagtattgcataaacttgtctctttttttcaagaatagtcagagtttataagtgtttctcaagaaacctcaggtaaattggtgctgattgcaaattgtcttcgtttctctcgaccacagagaaatagtttgtgatagttttaataaactatttccttatttggtaatggtttcagtctcatcacagaaataaaattacatgtcttttttagcatgtatcttacggtttgatggtctactcttgttttgtggggctctgacattcatatctgctacacatggccctttaacaacgaccctctctttctttttctagaagtatgacaaattctgcaccagtaatactgtttcatcatcaaataaaataaacaagttataggaatgtactctggctctttgcttcttaattactctaatttgggccccagctggggcccatctctgacaatcttcactccatcagataaaggggaattgtttaaaattgtgctgggtttgttataagcaatggacgaacttctaaaaggattatctccaagttgatatctgataaaagcaaaatattaaggctgaatcgaaatgaaaaatgttttgagacttctccctgttcaaatggtcttaattcattatcatggtagagctgaagacatcttctatttaatagcttcatttagttgttatgaaaattttgtaaacgcatttttccagatatctcttatattgaagatgtactgagtgcctaaaatcaggaatttttgaaacaattcaagagatagggttaaaaagttcatttcagtgaaatagtgaaataaagggcgaagaagacagaaagaaagatacagatgaagaagaggagaaaaaaaggaacgggtaccagataaagtatgaagcataagtaaaagtgtacccatgggttttgtgtgcaaggtccttcttatttctccccatgtgattatacccaagtattctgccgaaaaattcagtttagagaagagatggaggatacaagtactcacttaggaggcacaaagacatatatatatacacaaacacccagaaacagaaagcaaagcctgctcattagagaaaatgtagaaaactttgaaaagtagaaagaagacaaataactggagagagacaaaatctgcccagcctcaacagaaattctgttttcttttttctttttcttttttttgtctgtgaatgttaactgttttatttttttgagctttgaattctattgtatttattatttttaaactttaaaaatgataactttaaaactatcgattaaaataattgttagtttacttgattatattatagacacagaaaagtgcataaattgttaagtgtagagcttgataaatttccataaattgaacgctcagtcatgatagcaactattttgcaaccatttactttttgaagacaattaggccacttgttccaggacctttgccttagtcttccagcagaggtatttcttcctcccttgtgacaaaattagccagactccttaatggaatctgaggatagggaggggttcagtcacagaagcagtatggtaaccagcccgatacaggtatgcatgacagtaaaggagagtgttgaggaaaacaatcgtaaacatttaaagacacctctgggggatgagagctccaggtgcagctggaagaggagaacactggtagcttcacaagggcagtcgcaatgacagccccagcactggcagcccagtaggagctttgggcaatagcccagagcagaagcagcagcctgagagctggatgtaggaatgtgcacagaggcctgactacaaggggcatcccaaaaagaggggaaatgggtgaccagagcagaacaagctggcgcaacctcggcaggggcaggagtgaaaacgtggcaagtctgagaatggactgagagacaagagggaaccgcagtaggacagggggtaggggaagatacatttaaggaaatcaaaagagggctcaacagcagcaagaacatggatatcaaatacttggaggagaataagaggggataaaaagataatgcaaattaactaaatccgccttctttatatctgagcatgatatgtggtatgtaaagctaatgcataaagaaatagaaaagatttagaatgcagttagaaatatagagtagaaataggaatagagaagagaaatagatgataggatagaaatagaaatacagattagaaagttgatataaaaagaaatgaaaaaatagaaaagacattgagtaggaatagaaatatagaataaaaatagaagtaaatagaaaaagaaaaccgagaaaactacatactaacatcactgaggaacatagacgcaaaaatcctcaacaaaatactagcaaactgaatctaatggcacatcaaaaagaaaattcaccatgatcaagtggatttcatcccagggatacaaggatgattcaacatgcacaagtcaataaatgtaattcggccaggctcggtggctcacgcctgtaatcccagcactttgggaggccgagatgggcctatcacgaggtcaggagatcaagaccatcctggctaacacggtgaaaccccgtctctactaaaaaaaatacaaaaaattagccgggcgtggtggcgggtgcctgtagtcccagctactcgggaggctgaggcaggagaatggcatgaacccgggaggcggagcttgcagtgagcggagatcgcgccactgcactccagcctggaccacagagcgagactccatctcaaaaaaaaaaaaaaatgattcaccacataaacaaaattaaaaacaaaaaccatatgatcatctcaatagatgcagaaaagacgtttgataaaatccacaatcattttatgataaaaaccctcaacaaactaggcgtagaaggaacatacctcaaaataataaaagtcatacatgacaaacccacagccagtatcatactgatggggaaaagttgaatgcattcctgctaagaactgaaacacgacaaggttgctcactttcaccacttctattcaacatagtactgtaaatcctggccagagcaatcaagaaagagaaagaaataaggggcatccaaactgggaaagaggaagtcaaactatctctgtttgctgatgatgcgatcttatacttagaaaaccctgaagtctcctctaaaagatgactagatttaataaatgaattcagtaaagtctcaggttgcaaaatcaatgtacacaaatcagtagcactgctgtacaccaataatgaccaagctgagaatcatattaagaactcaatcccatttataatagctgcaaaaaaatagcatacataggaatatacttaaccaaagagatgaaagatctctaaaaggagaattataaaacactgaggaaataaattatacatgacataattggaaaggcatcccatgctcatgaattagaagactcgatattgtggaaaatgaccatactgttcaaagcactctacagagtcaacgcaattcatattaaaataccaatgtcatttttttcacagaattagaataaacaatcctaaaattcatacagaatcaataaaagagcctgagtaaccaagacaatcttaagcaaacaaaacaaaatgaaacaaaaaattctggaggtgtcacattacccaactttaaattaaacaaggctgtagtaaccaaaacagcatagtactggtataaaagtagattcatagaccaatggaacagaagagagaatctagaaataaagccaaatacttacaactaactgatcttcagcaaagcagatgaaaacatacactggcagaaaggacatcctattcatcaaatgatgctggggaaattggatacctgcatgtagaagaatgaatcttgatccctatctgtcaccatatacaaatattaactgaagatgaattaaagttctaaatttaagacctgaaacaataaaaattatagaagcaaacctagaccaagggaaataacttgtgactaagccccaaaagcagatgcaacaaaaactaaagataaataaatgagacctaattaaactaaagaatttctgcgcagcaaaaaaaaatataattatataatacataattatatattatataatatataatatattaaatatataatatataatatcataatatataatattaattatatattatataatatacaatatataattatatatttataatatacaatatatattataaatatataatatataattatacattatatttataaatacatatataaaatagagtgaataacctacagaaagggagaaaataatttgtaagctatgcatccaacaaatgactggtatttagaatctacaaataaatcagcaagaaaaaaaacaaataatttcattaaaaagttgacaaacaacatgaacagacgtttctcaaaaaaagatgtaaaaatggccaacaaacatatgaaagattgtttaacatctctaatcaacatggaaatgcagtttaaaaccacaatgagatactaacttctccagctagaatggccattattaaaaagcgaaaaaacaatagatgttgagatggatgtggtgaaaacgaactgcttatgcattgctggtgtaacctctatggaaaacagtatggagatttctcagagaattaaaagtggatctactattcaatttagtaaccccactaccgaaaggaaaaaaagtcagtatatcaaaaggacatctatgtttattgcagcacaatttacaattgcaaagatatgaaataagcttgagtgcccatcacctcatgagtgtataaagaaaatatggtgtgtatataccgtggaatactactcaggcacagaaaaatgaaacagtgtcttttgcagcaacatgaatggaactggaatccagttattctaagtgaagtaactaaactcaggaatggaaaaccaaatattgcattttttaatttataagtgggaactaagctatgggcatgcacaggcatacagagtggtataatgggtattggtgactcagaaggtaggaagatggatggaggatgaggtacgaaaaattaccatttgggtgtaatgtacacagtcgggtgatgggtgcactaaaaccccagacttcaccactgtacaatccatccatgtaaacaaaaacaacttgcactcctaaagctattgaaatttttaaaaaggtaacatagatgtgaattagaaacaattaaatgtaaatataattatgttgacttatgtggggaatatttagaagaataacaaataataaaaagtacattttttggtcacatacgtcttttctttcattatgaataatacataatttcagttctgataccctctttgattagaaggctgatttaaaaccaattttaaagtagtttccttgaaaaagcttatgttgatcatgaatctataattttattgccatgtggccaaataatatgttctgtatgaattttaacttttaggagtttactaatttttatttgaaatatacaaacaccattttttaatctcactattgagtcatgccttagctagatataggaatcttattgaaaatgacttttcctgaataatttaatgatagtgcttcattattttctaagcagttatttgagctgttaagaagttgcaattagtgactttgtcactcttttaaaagtaatctgtagttattctggcagctttaagattactcttttttttttttgcaatttcatcaagctacgtgcatatatggatttattttattttattaatcctgttcaacacttattatgctattgtttgtttttggagacagggtctccctctgtcacccaggctggagtacagtggcacagtcttggctcactgcaacctccacctcccaggttcaagtgattctctcacctcagtctcctgagtagctgggactacaggcatgtgctaccatgcccggctaacttttgtatttttttgtagcgaaagggtttcaccatgttggccaagttggtcttgaactcctgacctcaagtgatcagcctgcctcggcctccagaagtgctgggattacaggcatgagccaccacacctggtgtggtttaatgtaattaaaccgatgtggtttaatgtaattctccagtctggaaatttctcactgattacctgtttgaatattgactctgctttttcctctccaggctccttctggaactactattagatactgatgaagctactcaatctatctcctatgtatctttattattattattatcgaaatataattaacataacataaaacacatcctactgaagtgtttttctacagtggtttaattcaattgtttttagtacattcccaaggttgtccaaccaccatcattgtctaatttcagaacattttcatcatccagaagaaaaccttgtacccattagccatattacctcattccccacttcccgagcccctggcaaccattaatttactttctacatctatggatttgtctattacagacaattcatataagtgaaatcatacaatatgtgaccttttgtgtatagcatcttttacttagcatcatgttttcaaggtccatccgtgtggtagcataaatcaataattcattactttttctggttgaataatattctattgtatggatataccacatttgtttatttgtttatcagttgatgaacatttgagttgtttacactttttggctgttataaaaaatgcttccatgaacattcacttataactttttgggtgaatatgttttcaattctcttgggtacatacgtaggagtagaattgttggattgtatggaaaacttatgtttaacttattttattttacttatttatttttatttatttatttatttttgagacagagtcttgctttgtcgcccaggctggagtgcagtgtcacgatctcagctcactggaacctctgtctcctccctagttcaagcgattctccttcctcagcctcctgagtagctgggactactggcgtgcgctaccacacctggataatttttgtatttttagtagagatggggtttcgccatgttggccaagccggtcccaaactcctgacctcaggtcattcacctgcctcagcctcctaaaatgctgggattgtctacttgagccaccgcacctggctaaaaatttatgtttaactttttaagattttccgaagtggccacactattttacattcccaccaaccatggataaggattccaatttttctacagcccagataattctggttattttctgtatctttgattatagctatcctagtaggtataaacatgtatcatattgtggttttgatttgcattccctaatgactaatgatgttgagaatcttttcatgtgcttattttatatcttcactggagaaatatctattcaagtcttttgcccatttaaaatagggttgtattttattgttgatttgaaataataactaaacctttctttatgccagatatttttattctggacaccggacttttatcagatataaaatttggaaacattttctgccattctgtgagttttattttcaccttatgaatgatgtcttttgaagcacaaatgtttttaattttgatgaagtccaatttatttattttgttttggttgcttatgcttttggtgtcatatccaagaaatcattgtctaacacaaggtcataaatcctggcaccaatgtttccttctgagagttttatagttttagatcttacatttagatttttgatctaaaaaattttgattttgacttttgttttgaataaatttttgtatatggtttgtggaaggagtccaatttcattctcgttgaggtggatatctagtagcctcaacaccatttgcttggaaaagactactcctttcccctattgaattgtcttggcacccttactgaaaatcagttgaccacataaatgtatgtggggtggtggctgtttttctcagtcaatctttcttctccagcggccttaaatataaccccgactcatacagtggccccagcttttgtctctggttgtgaaaggccacatgttcctgcaggagttgaatttaggctaccagcaactctgtccagcacaaagctcaaaaggcaggactaccacctcttactttgttctctcttctttcacttactttctgttttaatattaacatctactttgttatgtgatttttttttgagtaattaaaatattatctatctatcttctacccaatatttttgtgtatgtatgggggggtggtgtttttgtgtgcttccttttatgttttgacaaaaaataaatagtacatataattcttaggttctgtgtcatgtatctaccattatgtaatgctatgaaacgaccacaaattatcagctgcatgcaacaataagcacttactactcacagtccagggatggttggttggaaatttctgctgcttttggctaggatcgtctgatggtctgggagctgagtggctcttggctgatctaggctggcctcagctaggataacaaggacattcaacttctagtcaggtagattaggaatttcctcatgggattgcagagaccaaaaaaaggcagaagcacattttcagttctctgatactcctgctaatattgtttgggttaaaataagttgcatatctgtgctcagagtcagggggttggaaggttatgctgctcatgttgagacagcactgaaaagtgacatggaaaagagcaaggatatgtgtaggtgtgtgaagaattggagccatgttttgcaaccattcgaccacaagcgtttaaaaaatatatattctattactccataagaaaaaaagaggacgagggagagaaacatgaggaggatagaagtaactggtgagaaatgaagaaaattaggattacatgatattaataattgttgaagccacctaatgggcacattgaaatttcactatcctgtgctctatactttcatgtgtttgaaaatttttcactatataacaataaaatgatatatagtctatgtttgttggctataaaagtctttattcagatatattatgtcaaagctgttatttattcaaatcttttatatttctagttatatttttctactttttaaaaaaattttttaggtaattgtactaaactcttccaccataattgtgatctcatcttgggatttgccaaaaaacatttatagcatgtctgagaagtccagaggaagtatatatctcctctttgctccaaccttcttgtagcagggtatgtgttgaatcagtctgtcctgaaatgtgtgagtcttttaaaaaactgaatactattggtcatttttgtttggagatttctaaggcaagaagtttgtctaagtaccctaaaccagctgggcactgggggccagtgacaggactaggaaagagatactcatgtccatttcaaagacttttgccctatggaagaggcttctgttagcttctgtgacctctggtgagttgatgctggcattagccactgggctgtcttgctgataaattggctaaatcattagacatattcccagaagggagtatatggtgaatggctcatatgggcccccgggaaggtggctgcacctctgagggtcctttgtgctaagggagcagaaaaggacctcgctcatgtgctggataaacatatttgtcactgttttcattatttccctatgtatagttttaaatttttcattacaaagtcatttatttaaaatagtatgtatgcactggcaaccaataattttcccttggacacagtcctgtggcaaggatccaatgtgataacatatcaagttaacagaatattttcaaaatactcaaatttggtctcataaattactgaaaatattcatattcagtatcattgttgttgaattagatgtagaaataggtgacagtggccttttcctatgccctgaaacctccttttgccttattgccaccttttgatgcgatgctgaacaggttgacctctgaatcttgaagagccctttgttttccctcctgatatcatgttggaatttggaagaacagtgggtcttttggttcactgcattccactgggacccttccaactccagctcattagaaacacccccgagcctgaggactaactatgatgtcatatgtcatagcaatgaagtaattatggccggccaaggcaaagaacaattttatttttgctgctttgagaattttctcatattgcttcaaatgtaactcccacctttcaagtaaaaattattataagtagattcccagggtcaaaagaacaagtggaaacttgttggatggggtcaacctggaaactgctgagatatttgtatacatattccctttatcttgctttggctcagtttttttttgttcctttcaggtgtgcctaatattatactctgtgttttgaaaggtttgagggagaaggctgcaaggagtcctgtgggaggccctggggtcttattagttgaaggaaacaaatcatcatacctttaatactggctccaatttgcccctttcatgagtagtcttggagagataattgctaatctggaatggacatacttctgtaagtttatatcaaatacattttttccattaaataatatttttctgtattccaattttgaggaaagtaagttaatttaatttttctttttcctctgatatactttttaatgaatagattgaaaattaaggagtgccattatatatacactactcactttagatacaatgctttgaaaattaatgagtgccattttatacacactgctcactttagatacaatgctttatatatcttaactcatctctcaaacagtgatcttggttggcatttttcaaactgtgatgaagacactttttatagccctgttcagaatacagaaggagacctactcttctttgatcacaatctaaagacagacagaggacatgtggaaaggtaaagaaagttccaacattcagtagggagaatatcgtcacaagccttccctctttatctcctttttaactctcttttcagattaggtttgtgaggagatgatttataaaaggtaatttgttgatcttttttccccggagaaaacatatatggttttcatcttagtctctgcagggtatgtgacccacaatatattcagaaacctccaaaaacagtactgctatttactattataaatgcataaaaataaaaaaactatacatagaaaattaataaaagaaagatatgaatcttttctttcacgtctttaacatggcagtacgtaagtatacaatagaagtgatattttcattctcagtcacccagttttatatttcagaataaattttgacttccttctcctttttcctttttcttttcttttcttttcttttcttttcttttcttttcttttttcttttctttttgatggagtcttgctttgttgcccaggctggagtgcagtgcacgatctctgttcactgtaacctctgcctcccaggttcaagcaattctgtctcggcatcccgagtagctgggattacaggcatctgccaccacgcccagttaatttttgtatttttagtagagatgggctttcaccatattggtcaggctggtcttgaactcctgacctcaggtgatccgccctcctcagcctcccaaagtgctgggattacaggcgtgagccaccgtgcccagccctttctcctttttcttatactcatactcaagcaaatgttattttcttccagaggtagtgtattaatctgattttgctacaataatacggtgtaacaaacaacctcagattctcagtggcttccatgaacaaacatcagtaacatatatatttcttgcttatagatctgtcatggattaaatataaacaaaaatgaagcaagaaacaaaactagtctttcaatgaaaagctgaagatgctgaagaagaaatgcaaaatcatttcacaagaaaaacaaaatcagaccaggatcacttggcgtaccatcctagcaaaatatatcttcttggagttgccctgacaatgctcctcaaaaactactttcttcatcttcttgcgggttaaatactgggattaaatcctagcataaaaattacatctaaaatgaaacacagctcttcaccattgttgacctctttaacaccttaatgtctactcaatctgttgttccttttaacttcactagtgtatttttcacaaccaaaattttggaatgatcttgagctccttcatgattttctttcctttaactcaacaatatctagaattacctgtactgtctttcacacataatttccttccctgacctgttttcagaacaatcacaagtcactttttcttcccctgcctagttcaattcaagacagggtacttttcctttttttttctttttttaattctcatttaccactcactttagactctttcctagactaatgacattgtttcctaattgatctctttgtttgtagtctttcctaacatttactctgttatatccatgatgcagaagttcccacaggagtcaaatttcttgatttttatttcaaggttcttaaaactatggctccacctgaagttcagagacatttaataactgattgggcacaaaattataaatggtctctgtcatacactgggtcacaatctaaacggagaaccaaacacatttttaaaaattctgagagaatgcagaatgcttgttatgttctggaaagtactgtctaagacatggataggcatctttttttaattttaatgtttatatttttatttttatagttaagaattttttaatatgttcaaaaatgtgactagcctatcaaagttatggttgcttagcatggtatagagaaaagcttaagtaagaatatggaatctctcttctccctttcctgctccagcaaaaaaaaaaaaaaaaaaaaaaaaagtaatgggaatcagtaaaaaaatgttaaattaataaattaatacaggctgactatctgaaatcgttgggactagaaatgtttcagattttgaattttttcaaattttatagtatttgtaaatacatgatgagatatgttggggatgagattcaagtctaaatacaaaatttgtttatgtttcatatacaacttattcccagtgcctgaaggaaattttatacaatattttaaatatgtttgtgcatcaaacaaagttttggctgtgacccatcacatgaggtcagtgtggaattttccgcttgaggccagtgtggaattttccgcttatggtggcatgttggtgctcaaaaagttacagattttggaacattttgaattttgaatttttggattagggatgctcaacctgtaataatagggataaacaaatatgcaaaaattgagaaggttatggggaaaatgattgaaatttggcaattagtttaataatggctgtgtaggagaaggaatggaaaaacagaatatgtctatttagtgttactataatgaaatacctgagattgggtaattcataaagaaaaaaggtttatttagctcacaattctacaggctgggaagtatgagaagcatggtggtggcatctgtttggcttccgatgagggtcttgcttggcaacacacacaagtcaaaacatggcagagaaggccaaagggggaaaaacatgtgtgaagaggcaaaacccatggggccttctaattttataaacacccattctcgcagaaacattcctgagagagttaatccagtcttataagagcaaaacctcaccataagagtggtgccaagccactcatgagggcaaagtcaccttatgacccaaacacctcctattgggccccacctctcaataccaacacattggagataaaatttcaacatgagtcttggtggggacaaacaaaccatatccaaatcatagcaggagataaatcttgaaaaataaatttggatatactttgggttgaggtggggtattttgaaaatcagactgattttagtctgttttcatctcagtggagagatgtcacaagctcaaggccaaagggaataaatgcatcagttagcttttgctgctcaactaacagcccaaaataaatgagtggcttaaaacaagaatcggttatcaggctcctgattctgagtgctaaccatttgggctgggctctgctgggtggcttttctggtcttctggtcttggctcagtttgttcatctatctgtggtcagctgctaggttggctgggggtaggatggtctagaatggcatcagctagtaaaacgtttctctatgctctgtagttttgtatctttcagtaggtagtatgggttattcacttggagatttaaggatttcaaaagagagtggaagtgagcaaggtcttttaatgtccagagttagaacccactcactgacatttttgccatacttatttttttgggcaaagcaagtcacaagaccagtgaatattcaatagatggcaaaagagcctttctctcttaatggaggagctgcaaagttataatttaaaggatgtggacataaggaagagcaaagaattatgttcaaacgcaacacacaattagttttatgctttaggatgattcctttgttacaaaccattaaatgctgaacagactatagaattaattgagatcaaatgagagtaaagactataagattaattggaatcaagtcacagttgagacaggatgaccattgaaaaggctgatataataggccagagaaaaataatgtgagagtgaagcacagcagttggggtataaaggatgcttgaggtattttaaaaggagaaccccaggagttggctctggtggcatttttaaagggtctatggtgtggtgaagggtgaagatagaagtcgtactcctgggaaaccagtgggatggtggtgccattagtcaggatgacagacataaagaaagcaggcttggtggggattggtggtccgtggaagagttgcgatgctaactggtcttctatgtggctgtgtctagaaagaaatttgaaatttaggtgtggagctcagtcgtgaaatagagaatagagctgtaaattttgaagtcattcacatattggtaagaacttgcaggcaggagagtgcatatggtgacatcccctgtacccttagccaagctgtgctttgtatgcagtagatgcaaaaccgatcattttctagccagtagcaaaaactgtgcagtctatttaccatcttcaacacccagggtgaggctgttttatttcttgatgagctgattgtaatataagaaattatggtaaaagtcaaccaggagcagaggttaatattggaaaaaagatttttttttgagcatcaactatgcataggcttctgagctaggcagttttcctgtgatacctcatgaatcctaacagtagtcctctgagttgggtgcctttatcccacctcacagactcacagagagagggcgctaggttttgaggttatcagtacttctgagggttttccaggtcgacatacacatggaacatgatcctagttctcctgaaggaggctaccactggcctgagggtgtgggtcccaagacacaccaatttgttcttatggctgggggcatcagtgtattggcacacctggaactgatatgtggcacagcgggcctcagctcaccagctgggaaactgggttaaataaactgcccagaataatagatctaataagcagtaaaactttgacaagaattcaattctgcttgattccaaagtttagattatttccactacgtcatgtggtgactctgactgggtgttcgagtatagattatgggaatggtttatcattggcaagatatactgtcaccatagctaagatacatgataccttttgttttgtaattcctaaaattggttcaataatatgggataagcaaacactggtgatgcttccctttcttgtaatttaaaaagatattctaaagtgatattaactaagaccacaacatagtgaggaaatgagctatgaattttcaaaatccagtatatggattacagatacatttcaacactcaacatatgtattttgatgttttgtttcgtttgatttctgaaatatgctttccatttcaaagtgtctattagtttaactgtaataaccaagctttggcttaaataaatgaagagacttatattaactattacacaactagagatttttgatagctccaaacccctgggtgacagatttttctgatctccaaggccagcttgtattgataaggctacctgacacacagtctgagtctgtactggcacaggaggtgaatggtcactcaggagccacatacttctatctctgctcttaacactggttacattccattgtacccttgcagacttgaggagaagtcatactccctcgtttgtaagtactttactcttcagtagaacataggagaatgaaattggaaacctctggcatagagatattgctttactttttcctatctttgtgatttggagcaagtggtatgacttctctgactttcatgtaaaatgggagtaaaaatatccacctcatagagtttctgtgagaattaaataaaggtaatgattatatagcatttaacttagctcttggcttatagatacaatcatgtggtagcagaagtgatgtagtgatggaggtgataatgcgagagctggcgacaatagtggaggaggtggtaagaggcatgaatgtggttctgatgctggtgaatggttgggttagtagtaggactgatgatgaggagttggtacaggacatagtggtggaggtagtggtattggtagcagaagtgaaagtgttgctagaattggtggaggtgatgatagagataatagcgaggtggtgatgatgatggtagaggtggtggtggtggagatagtgaaattggttttggagaaaatgatggaagtgaaagaggtgacaataatggtggaccttgtggaagtggagatggtagtgagtggtactggttgacataaaggggagatggaggtggtgatgatagtggtagagatgatggtggaagtacaatggaggtagagattatggtggaaatagtggtggaggaggtgctagagtgactgctgataatagtagaggtggaagtaaaggtggtggaggtgatggcagtggtggtgggggtgaaggcagtggttggtggtggttgtggtggtgaagacagaggtggtagagatagtggaggtggtggtgatggaagtggtgacagtgaagatggaggtagtggtggtcaaggaggtgagggagggggtagagaaagtggacttggcaaatcaatgtgacaatgtccatagggagcagagaaactggaacccatggtaaatgttctaccctaagaatctgaaaatgaaaggtgaagaatgtctgttctcaggacagctttggtataatcaaaggggcttcagttgacactgggttaacaaataatatcctttccctgtgtagtattaaaaatcgatatcatctgagattcaaatctaaattcctatatggtcctttttcttctgtggcctgttgccacactctccattcaagtttccttccttcaaagacactgttggttgaataattttttgcatgttcatgaactcacactcgtaggtcgtgatggactgaaatcccactacagacatgtgtctgcttctctgtctctttgatgcatggattcctgtgctgacatgattgattaactgtgcaaatacaatccttttctggaccttccatcgtctctttgatgtgccagtttgaggcagtgaagctgtggagagtccagcgtgtctgtcatgagccttccctatatattagcacacgggaaaccttgccttatgactcgaggtctttgcctctcagtcctcatatttagttgctctattttgttcttgaaactgttgcctccttggccgcctgaggcactgatctctaggtcagtgataaattccacccagttaagccacatgactaatttcctccaccactttcaaaacagagtttctggggctgtgcctccccaccatgggctatgttgctggcatgagaagagcccacttcttgctggcatcctactttctttaccagttcagaaggccatggccccacagcttggcaccacagctagcatgaattccagggacttgtcaggcttgccatcgtttcatacaagcctggtgtttgtgcttgccttcccccttggcaggtctgagaatttccacccttgtcaatccatcttgtatagccacagaacagacggagacctgtggtgtctctttagtgtgtgggtgacgctggaaaacattcctggtaccaaactgtggtaagtgtgccctgccaggacttaggacttttgggaagtgactgtttgtcccaattaaaagtgttttattgttaagaaatgagcttcttgctgaaggtcttctttcaacaacccaactttgttaagtgaatgctcatggcactcactaatcttccgtctctgacagcctcctggccaatgagattatcagttcaaactatggaagcaaaatgcattttatttattataattctgagatgttttcaataatgcaaatagcagcgactttgcaaagtgggtctcatgaccttccagaggcctgggctagtcagcagcctgccaatgcaaacacatgctgttctgaagccttcttgagggcatcctctgccacggatggagcctcctccactgtcatgtttggccttctgaggagacagaccaaagcactctagaccaaggcaagcacctgtttgtattaatagtgcctaagatgatttgcttctttcatgctttgactatttctgtcctccccttgggaataattgtaacaactaaaatgtattcagcatttatcatttgccaggcactctgcaaaatgcttttcccagatgatcacatttagcactcaagccatggcatgaggtaagtactcttcttattattcctgttttatagatgagaaactgaggcacagagaagttaagtgactttcccgaggtcacacagctggcaagagatgaatttggaatttgaattgacttagcctctacaccagaccattgtctggggttggtaataaaacatgataaaatgagcaaacaatgctaactgcaagtgaagctttgatcatataaatggaaggaggtctcttggcctttcagctaaaaacacttttgagagatgaaaaggagatgccctctgtcttaactttaagagagtttgtgaagatcgtttttgtctgacattatcacaactctaggcctgaaggcagcccccatgactctcctttctgctccaaggcagtgcctttttggttgcctgattctgctgtgctcatccttctcttaaagatgtacagcttgtttctatgacccttttctttcttttttccttcatgacttgtacagatagacttgcccggtttggaagagtatcggagaagtcagtttcttgaatcactttagagatacctgttggctaaatccaagagaaaggagttattgctgaaatgctgagttcaagatggctgtatgcaagctgatttgtgtgtacacacaaataggtgtgagtacattaaggaggcaatgtcaggaagttacatattgtgttctcaccaagcaaagggaagagaagggaaagttggtgcaaaacagacaggaatttctgcatctaacttttggccgaatacatttgaaacagaatctttccattgctatccagggaatgtatctgaaatcgattagcatttctggcacaacctatgtcaaactgagcaactgcattcagtttggagatcttttagatcttgcaacaggatacctgggaaacaactgagagaacactgatgctttttagagacattatcgggctctctctgatgtcgaaatcacctctagtattcatgagaaaaagagcgcagcattgtcgttggtccagattgccttacagaagagtattattcctccttccataggtgtccccaagacactcacacacagaacttcaccatttgagccacagagaagaactttgaagttgggtgacctcaataggcttgtgtgaaccagaaaaagatggagctattcttaagaaagaacatcaaaagtttgtgaaaatcaagatacaaaggagtcaactgagaactaggttttacaatgattgaaaactatagtgtgtctctgtagatggtggctagagagagtgtgctgtttgaaacagctgttatcttgtttgttttcaaaataggttaagagaaggagggagggaggaagagagagagagaaagagaaagaaaaaagaagaaagagagagaaaggaaggaaagaagcaaggaaggaagaaaggaaggaaggaagggagggagggagggacagaggaagggagggagggagggagggaggaaggggagaaaactctcttgagttcagcctggactggatgtttgtaacacgtggctctgggaggaagctatagtgtggaggtatcaatttgatataaatgaggctgcatttggatagcttcagttctcatgatagtggctatctttactttcttacccttgaaaggcgaggaaaggaagggattggctcccatgctgtttccaaagtctcaggactttcaaggccatctctctcattagggaaatgtaagtctgtgattgacaaggaccttagagtcatttagctccatctgttcctccacacagggacactggtgttttaagtgagatctatagaagatccaagtggaagctttagctaattacctggcatttctgaacctctgccacatggatatggaaggcagttttgcatagtgttttttccccaatgctcatatcacaccttctaaatgacagctttgcttattgccagtctgaggttgtggctataatgaaataagaaacactagctttctgttttacaattctccacagtgtctaacatccacaattgcttttaccagaaccttgcacatagtaggtgctcaataaatattgcttggttggccattaattggaggacacagataattgatctcctagatttctggtcatacttttgggacttttgtgatgttcatagagtctataaattcaaagcctccagtagattgtgacataatgtgctggaaaagtagctattattttggtggaaaaaaaaaaaatccccgagaaaggttttaggttttggagttggaagcaaagaatgacatagaaaagacttcgtgaaacttccatgtagaaatcaggtaaagtttgagtttttcctgtctgtgacctgctaaaaacaattcaggtgagaaaacaggtgtctttatatcagggaaaaggcagtaaagcatgtatgtcttcagttcttactggagatgagccttcatgctttgatggaagtgttagtagataaaactggcctttgcccagacccttgctactaaaatgtcagagagtgaaatttaaatgtatttggtgaaaatcaaacttgttatcacttactgttccgacaggcagtaatgaaggggagaggtgattagatttgacagtctaaaggaaagggggccctaatgaaggcctataggattattttttctttcttagagattagtgtcattggtactcattctttatgcatgggagactgagcaaatgacagaagtgcatgaagggtacagtcttaaaagtgaggctggagtcacctcagggagggtgacaagataagcactgagagggtatggcaaaaagaaagtgcttttgaatttactatttttgtttattcctggggaggttcattcccatgggcagcctataaacctatttccagtggcttgcaaatacttttctcatttaagtagaaacttgaattgtcaaattagagttgaaaacgttgtagatcccctgaaattctgaagaagcttgattagatcagtcaacttttccaatgggaagctaaaataggccctaaataagcagccacatggaccaaaattgtatatccttcagtcaactactgttagaaatttttctttaaatccatgatttctcaagtttattagctgtctttagcagtgttgttttaaaatagtttattcaattttctttcagtagaaataaacatttattccttagagtcataatgattattcaacctgtattcccttggcagttccaattttaactatagtgttatggttttcccactgaccataaaaatgtcccagataacctaatattttctcattcatgctgtctcccatgtgtggaagagtctgaacctcacatctggaagtagcagggcagtaatttcccagaccacatgtctcattagggggcaggagactgaaagacatgggtaccattcttagactggggagacagaaaaaaggtgagtgtgtagtgaaaaactgagcaaatgataatgataggctgagctgaaaatttgtaaaagccctagggctgaagggctcttcaatcgttatgtgttccctgctgtgtgaagctggagggtgtgtgcacacaggaaacctgcttccattcaagactcattctcagatgccacagatgcaattttcaaagtaatgggtacaccaatcaccaaattacttaacaagtatttactgaatatctgctaaatattagccactcttcaaggcacttggggatacaagaacaaagcagaaaagcccccttgtcatggagtttatcttctggttgagtgaaacactctgtaagtcaattttaaaagtacatgtaatgtgtcatatgctgatgagtataatgaagaaactaaatcaggatgaggggctgaagactgaggaaagagatattttagataggatgttcaggaaaggctttttctaatgaggtgacatttgagctgagacttaatgtagtgaaggaggaaatgatgtgcatctgtgggagaagaggaaaaggaagaaccaaagatctaaggtgggtatgttgacatgttccagaaacaggaaagactttactgtggctggacgggattaagaaaggagaagaccattagaggttaagatccacaaggtcatgggattcactcatgtggaacctcctaggattctttggtaaatgtcatgggaagtcactaggccaacaggatgatcagaactggtatttatcaaggagaaggctccaggggaaggaatcccaagctcacaactagactgcataggcttacggtgcctattacacattcaactgaagcattggagaggcaatttgtcatggaaggttgttgtttaggatagagatatgggctggaaacaaacatttgtgagtcagcagtgtgaaaatagtgactaaaacaaagagattggatacaattaattaaacaatgaggtaattaaatagagatgtttaccagttcttgataagagctctgggctaataatctatgtatggattgatacagctttatatcattgggctcagttgtttaaaatgaggaaggtcaccaccctcataccttgagtaagatccagctccctttttactcttactacctcctttctaaggaggaggaggagtaaagttaatttttcatatccccagatactgattggaacacttgtcactacagggcagagtcattgtgctttaaaaggcatgcactcatagttcaatcctatgaatggatttagaaagatggttttactccttggacttgacaggccatttttctacttcctctatgctcttttcccatgtggcagcctggcctacagagagtgacttaaacttcggaagggtggtctagaccagtctggtgatgttttattttccagcattccaccctgggtggtgcgagcgttcagctccttttgtcccacagctggttggctaactgtcttggtgcttcttttgaaaaaataatcatttctggatttaaggaaatagaatgggaacactcatattggccaagaatccagatccttcaattcattttcccagcagagaactgtgcattgggcagcactggcaacatgctcatagcacttttacccattttagtaattgtccatgtgtgttgctccctgggtgaacctcagagaggaggagagatgaggaataggctttaggtaccaaaacctgaacagaatccttcttttaaagacaatgctagtaaacatgtggtttcctgaatatgatgaaacaccttaaagtaatgcaggctttgtagatggttttgactcttcctccctgactagactagttccttcggggcagggattatgtttttttcacagatgtattcccaatgactaacatgattcttagtccatgggaagcactcaataaggcttgttggatgaggaaaggagatagtgaccctggcattatctattttcttggaaaggggaaaatatcatattcttacgaggagccatttctttctcctttttattatggcaggagaattcacctctccaccaatgatccttttatttccaactctctggagttaacacctgggggtctgaaggtcatttgctgcctcacctgaatttggaaatgtctcatcatgcatccttccagctcttcttgaaattcttagattatagaacagactgtgatctgatattgaaagatgatgaccctctacttcactacacaaaccacctgtagccttcagtttggtcaactcactgccccagggacactggtggattctgaccgcatgtgtacttgattgcatgcttctttgggctaggtgaattggaggttcttcttctcttagattttaccccttctctgtggtctgaaatctctagctcacaactttcttagaacacttgcggaggttggaatctgtctcactttcttggcagaaactaattgcctccttgtaatgttagtatactttagtgcagagcttctcaagctcagtgttgaccagaatcacctggaaagcttgttaaatatttttgggccccactcccgtaatttttgatatagtagatatcgagtggagtctaaacatttgcatttttaacatgttcttaggtgatgctgatgctgctgatcttgggaccatgctttgaaaaccactgggtggctctcaatcctggcagctcactggactcactggaggaatcttttaagggctgtaatgcctgcacctcaatccagaccaatttaattagaaactctgggtgtgggacgcaaacattgggaggtgtaaaataaaccatcattttcttctcctggaattaccacaggtctataataaagagacttctgccttattggcagtattagggacaaatacgtctctgagatggtgcctttttaaaaatgccaatggaccttatttctttaggacagtggttctccaagcatgatacctgaactagcatcttcatcacacatgggcctcatgccagacagatctactgaatcagtgacttgcgtttggaacccagaaatctatttaacaagcttttcaagtgattctgatgcccactcgatcctgagaaccactattcaatataaagtggatagatggcttgatagttaaatcagtcattctcaaatatagctgtgcagtagaattgcctggggaactgttaaatatatacaggctccccaacctcagatattctgatttgattgtcctgggtgggcatttgtacttttcaaagcactgcaattgatttgatggtacagccagggttgtgcgatgactgagataaatactgttttgtaaccaattaacctaaccacttacaatggctgcggctctatttctacatgaatgaatagatcttctggctgaccagatttgttataaaggaacatgtcagttaaagttaacatcaccaagtcctgtaggggacttggagtaaagtatgtatgaagaatactgcttggaaagtatagtggtaaacactacctgttgactatggctacaagtaacatgatagagtacttgaggatttgaagtgtagaagaaaaggagggtgtggtagattaattgaaaaaatggccacagttattcacctccttgtatccatacttctttgcaaggtgattctgatactttttccatgaaaaggtcaaaattattttccaatccttaaatctgggttggctataccaatagcacgtggcagaagtaacattgtgccatttcttgggccaggcttccagaaacttcatccacatccatgttctctcttggaaacccattgctgttttgagaactagctcaagctagactcctggaatatgagagaccaacatggaggagagctaagtcccagctgaggggacttagtcagtcagttttgggtactttgatcacaagcaacagaaagagaaactccaactgtcttaaatcccagctgaaggacttagctctagatttgcattacttggcattctagatttgcaacccaaatcaatccaacagctaacatgggcacatgagggagcctacctgaaatcctaagaaccaaccagttgggtgtagcccaaattgctgaccaacagaaccatgagctaaatagatattgttttaagtcactaaattctgcatagctcataaggtagaaagcctaactgacacagatgacataaaattaatctacgtgttcttaacctgaactggtgagagttaacataagacttagtggtttactaaaaactggatgtaggaagaagagagtgtaagtgtacagtgcctgaaatcagacagcattaactcctttgacaacttaacacatcaaaatcaaaggctttttaaaaatacatgtaatcaactaaaatttttcatgaaaattatttttgtcagcaaatgagggaaagttttgtgattcacaaggatggggacctgggtcacattggtaacagaaaacttgtagcactgaacaggagagcagagaccatagcattaatttagtaaatttcagtgctatgtaaaaggagatgataacctgcttaaaggggctataatatttgtttggaatgaatatcaaatggaagagttgcatcaatctgtctggtcttttaagcttctctctgactataggaaatgccttcctgtgtatgatgtcagctgttttcttcattaatagatgtgtggcatatttgtatttttgttttcctgctggagagagcttgtagctctctcttggttctcaaagggattacgattaccaaaagccatctcttatctcaggtcaagaatccctaaaagagtaacagaaaaattccaagtatgaatgcaggatgatagatatgtagagtgtggacaaatgctaatgctttaaggatttagacgttacctctcttgggccaccggtagaaaaagacgtgtaatttatgaggaccttgtgccagatatttcatgtgtgccgtttgatttaatcctcaaaaatgctttacaaggtggttgctgttatcttcatttatagataagcacactaaggctaaagattacgaactagtcagtcagtttgggtactttgatcacaagcaacagaaagagcaactccaactgtcttaatacaagagatcagctcatgcaattgcaaaaaggtgagttaggcagagcttcagttatggtttgatcagggcttccaatcatttgatctgagattgttttagcttagtctttctccttgttttggttttgtattctagccgcttagtttgtggtagctgcagcaggtccaagcctctgaactgtacatatcatttagaataaaaaaaaatgtataaaaggcttcagcttcactaagactgaacaaacttaggtcacatgtccacttccgaatcaattgctgtggctgtagaaaaccacactctaattggcttaggccttggttgtgtccacatttaaaagataggatggcaatgactttatactgattagtttttgtttttgttttaaagatgaggtcgtcctatgttgcacaggctggtcttgagcttctggactcaaagtatcctcccacctaagcctctcaactagccaaaagggacacaccaccacactaggctatactggctatatggactattttaaatgatcaagtatattacctaggtcattcccatctagagcccttagctcctactcagtagcagacaaaaggaacaaaggccgttaataaccaccttgtctagtaggtggtgaaaatagcctttgaaccattttatctccaactccacccacattctttcccttatgcctacacggtcttcatccaggaagtgagacttgtgccggaccatcagggttgggcaaagggaggtaatcttaaaatgttcactaacttgtaagagcttttgaggtctacaaatgaaaagcatgattttacgtgaactctgagaattaaccgtaagggttgtccctttctccgttggtagagttattagaagactagcagtcatttgttctactatcctgacaattcagggaatttttataagcagtgatttttgtaaaggaggggttaaaatgactgcttagacgttgacagtctatctctaataatgcatgttagaagagagaagacaaagctacaattcagctgctaggtcttggtgatgtcataaacacttatgacagcagtagaactttaagattgaattaccttctttgtacccactgaaggagcaggccttgctgtgtataacacattgtgtaagctaaacagtgtttggcggttttcacatggcacatgggaagaagggaacttgatctgtgaacccagaagatcatgaatctgataagaagagagataatttaaccccgaaaattgctttggtctctgatatgttattttcaaattaaataaattaatatgtgctgacattttcctaccctaatcttaaggcatcacagtttgattagtctaatgatgagtttcaagttgagcatttcattatgtaactaaaaacaccatagtccagtatcataaagttagttaataattttaagtgcattaaaatttataagtcgaaattcatatagtaggcaagggggagagaatcaagcctgtttctttttccttagcaatggaacatttggtaggaatattaccaattgaatattctaggagtagaaaacacggacagtttattcaagatttgaattaacaaggcaaaaataccagctttgaaaatcaagtgagctgtggatggtatataattgatgtcttcaaagccaaggagaaaatgaagttagcagaacagacggttgaaaatattattaaaatgagttttttaataaaattctttttatttgtggtcacttttttgatgttctcatttttgcttaatatgagctcacttaaaggcaagatttttctcttattaccttttttcaggaaaaattcagggtgactaaaaaaatgagtcatggattgccttaactcatggacagttactgagaagatacttcaatcatcaaaacataacaaaatctgttttaattacagttttgtatgttttttggtgacagtttttaaaaaagagactcataaaagccgtttggctatctgtagttgtttatagcagagctgaacgtgaaattaaatccaagttgaggacagaccaaagattcaccaaggaaacacccaaatcatgcttatgtattgactactgtcagtgttcaaaatgcaaaaagaaaactcattaacttaaatcatataaatatataaacatacttaatactaaacaagattttgtccttcaagattgatttgttgcatttcagaacactggtaattactgaaggacttgatagtttcaaaaataataacgacttctgcttttgtcaatagtagcagatctttgattttgctgttttaattcatatatactatcaataaaattcatttaaccttctcagatgtgtacagtgatcttattcctctaaaatcatccatacattaaaagaagaaaaatgatctgatcaattgttgtattgcttttgaataaagaagtaacattctaataaattcattatggagatggtagacccaatgggccccaaccattaaaacaatgaaagtttcttctagaagttcttgctgtattcacttttgtcttttccaggatacttgtggctttcttatatgtaaaacttccccttccaaaaatttttcccaaagataaacttgtggcttggggtgaattgaactggctagcctaagcttggctgaatgatggtgccaacccaggtagctagaacctgtgaaattttccctagcccacgaggccttatctagtgtaaatggaatgcagaagttattaatgatgtactttgaagcctattgccctgagggcaccgattcaattcctgcctatacctaagagttaagtcctggaaaaatggtgttgcagacagagggctgtgcagtgatttatgtgaaatgagttggtggtttaaatcaagagcttagttgaccagagtccaattcacaaaaaccactagtacaatttatacccttgttggcagtatcttcagagagcaacttaatgttgaatgactgaatgatcatcttctactctgatatttcctgtgaagcttagagaagaaaacacgctttttggatgactaaggtttctgctcagaagaaatgaaaatgctcacttccacagtatcatttgttagaagggctccattaaaccaaagatgctttataaagcaactcctctgcgtatttctaccagtagactttacacagaactgagttttacacaaccatataatgctttggtttttatagattatcatttattggaggtgaagtggagcaaataaaactgcaggtttctgtataagcagacatctagtactgaagaaacaatgagaaataatctttcttaaaaagggcactttgaattttagagttagaagaatgcttaaaataggaaggaagatatcaacatttaataaaacaactcccataaggagttattattttattttacaaaagaagagtttaagtacatttgactaatatctcataagaaacagaattatgtctagaattcagtttttaaaatgctcctattaagcatgctttcttccctcccacaaccactctctttcccttctttcctttcttccccagttaaaaataaggacaattttcttagacaaaaagcaaaatttaaaacaattaaaccacttagatcataattcatttggccaaatcttcttgaggatcagcctgaaggtgttttgttggaaacataatgctatacacagcctgattcttgccacaaggagcttacaatcaagtctagagtgtgatcagaccagattttattcctgaaagtaggacagaggtagcagttcacacttcaactgctctgtcagtccaaagcaaactgaagtttttaccatctagaaaactctgtctttcaccccaggccagggcctgtccctttgagggtagataaaccatctgaggtctcagggagactcactgagtgtgcagaatgccagggacacagaaatggctgcaccagctgcagacttggggtggggaaaacttacatagtgtgtacacagtagagtcaactcaggcacagattggtaactgctcaacacacacacacacacacacacacacacaaactacttttgatttgtctgcctctcctctaaccctcttccatcctaaatttccagtacctctctgcagccactcaattccctagtaccttctacctaaggcaggagcaatctgtatgcttccttcttcattgtaagtaatcagatttttcccaggaaatatagcacatctattaatacaatcaatggatcctagtgagttaatacacacccccgtctcacattttgccttcttcccctcagcattattgccttaatctagaagcataattcatatgatgtcattaataaaataaataatcatttaaagactaagaagaagagtggtccgtcagtcagactcccagtgggaaacagaagtcttaatcaaatgaacaagagtttgaagaagttgtatttacaaagggacatatttacaaaggtaggtggaggataaccaccaggtaaagtgaagtaacctggggttagtgatctgttattatatcatagctacccttacacttgaaggaattgggaaaaagagtcattatcagatgatcccacaaggagtggaccatatagaagaggccaacttgataggggcataaaccttcatcttaaaaaaacatcctacctgaggtgacttcgcagggaggcagcctgaagacaaaataccttgtcttgtgttccttcttcccttccctttcttcttggggttcccactgggtgaacccaggtggaagctggtggacaaaggactatacatatcacagcatggagaagggtggaatctaagactccaggggcaaacagaagataattagcacttggacatttgtcaacaggtggaaattttgacagactcctttaaataatgtagtagaggctcctgcctatttcttctattgtgcaactgatcccaaagtttcagatttagaaagtgaagttgtgactataaaactttacaccatctgatacaactggtagctggtggtgtcttttgctgaggagtggcaaatagcaagtgggcaagtttgctgaggatgtgagggatcagtttcagatgtttgagtttgaagttccattggggcatccagtggagacatccaggttgttaaataactgggtctggagacgagattggggatatagattgcacagtggactgcatttttcattgctgccctggaatggctgaaattaatggtatcataagcttgaagtatataatgaatctcttggtaatggcagaatccaggccaattccctttcaccacaaatagaaagctctctagttgcttttgtcagaagttgtgcataggggagccaggggatgtggtgggcaaaaaaaggcaaatttcctctcttggcaaatgggaccagaaatgaaatgaagataaaaatctagaaaaacattaccttaaagaattttagaaattagggaaacattttaataaacaaatggacaatataacatgacgaataataggtcttcttttaagtaagaaaataatattagccactatgcaccaaatattgactatgagtcagcacaaatgagcggttattaccagagagagcaaaagccaaaaaagcaaattttgaaattgtattaaggaatgtaagtcatggttaaaagccacatttaactactaggtaaagtttagagaacttggtgagcatccaaatattaaatgaactgctttagaaaatgcaagatgctgtattatatcataggtaaaatttgaggttgagttttgggtatcatgatatcagctaatatatgctgctgattctggttgcctagtctgcctgtgaaataaagtagttttagaagttttgccattaaagctgcccaagttttacaggctaaagctgtgtttctttccatttattttcaccacacattttaattctaggtgccttgcatttaggattttacttgacttattttaatacttattttgaattaatgagtgatcaacttggcattgcaggctttcattaataattaaggaagtattggacataaacctgctaatacaaatttttttctgaagaaaatccgttgcttttgttctgcaaatatcctttatattaattcaataggtgcaggcttttacagccctcattgtctattgcataaaatgtcaattattattttggaaggctttaatgcatattattaacctaagaagctgttatgggcaacattgaaatacttcatactgtctcatcaaaatctttttatatagtaaaagatgtgatttgctctcagctaaataccacaagtttgtagacatgccaactggaaagcattcttgatcaccaccccatgggagtgagtgggggatgggagaaacccttcaaggcttttgaaactaactgaacaaagtgtgatgggaattttccgaattctatcatatctttttatgggtaaccctatgactagggctgtccgtatgtgcaaactggttttaagaattattcgttataaaagagaaacaaaggattgatttaatcctttaagtgatgttaaatagctggtttaatgaggttttaagccagctatttaagcagcatatgaacatcatacctgaaaaaaatacatgttgcacatcaatatccacaccgacatgtttcaaagaaatatccacatctcttcactctactgaagctgtaatctctcagatgttgccagactgagattttaaaatccatgtgttatacagaaatttccgttatagtgacattcccatagtccccttattttaatgatcatccactaaaagtaatttatgtgtttagcattatttaccctagctctaagcctggctaacatatacaactgtgtgataatagtgagtttagccccaagagaataaactataaaaaattttaaaaaccttaatataaaataagaaaaatgatgtaaaagatcatgtaacttcatgataaagtagaacatacacatttttttcctttggggccttaactaaatttctgattgttaaaaacttttttagtgttttttagtagatactgatgtgcaacatgcattttttcctttagagcctccattcaaaagatctttaaaaaacttatctttctataaagagtgctggttacatcataatgtttctctatcctaaagcactgttaatagacaattaatgacagtgatgacagtcagtgtctttgatttctgaagatgattaatattgatttacgtatttccatttatgcttccaaatgtgccctttgcgtacgtgttcatgattttgctgagatgagcttttctctttccctacactttcttcttccaaaaattaccacactctcaacctctcactgtctccttctcccttattattatcaccattttttggcggggaggggcacggatttgttccaaatctttagccatgcttaagaacaaaacagatgatgccctactgaaaaggagtgggggaaaagtggcacaacttgcttttgcacatagtaaataataccaattacttattgcagtgtttcctgaatggaggatgattcccacttacggaattgataattacagattgaggagagatgggatatggctaacacatgcacaggctgctgtgactctatgtggtccctgtggtccctctgttggctgtccaagactggagcatcttaggaaatggctcacctggagtaactgattgaggtccagtcaggtaagtacttggttgtccatagaaagggatgaaggctacctggatgggtaactccctaagacacactcatgaggacaaacaactgtctcgaacaataagttacattcctatagcatcatgtaattgacaaaacatctttattttgttgatcattatcatagcctttcaagataggtattattactttctctattttacaggtgagtgagagtgagttcctgagtcattagttacatagctgttaccaagatcactcaattacatatacatcagccacccattccccatctatactgtcaatgaatctttaagaaaataaaaactttcgcttaggcagaaaaatacttttatcagaattaaggccaaaaaatagctggcaaaatttaattaaaaaacaaacaaaaaaacaaccatcatatctgcctggagcatcacttcactgagctaaaaagaaaatcagccacacaaaagctgacttattcacaggtattgcaccacaagaaggcatccatgcttccacccaagtcactcagaggaaagaagctgttgtgtgttacattttcgggtagagaagagagcacttaatgaagttttcataagtgaattttcatgccacatgcattctctgtgcataatcctttggagtaatgttaagcatatactggcacccacagtaatattttaatgtcttcagcttgcttaattaattttctttcaacatatgttcatataacattaaaaatgttccactaagccagacaccaggatattgctgaatatgcagatacttattacacatagatggacttaaacctattttgagcccatctacctacccatcagtagtgtttgtggtcttgtgatactatctgtgacccaattttaagtgtgatctcatttatatgtggaaactaaataagttcatctcatagaagcagagagtagtaaaggtagtagaggctggggaggagaggaagagaaggggcaagcggagatattgatcaaagggtacaaagtttctgttagactggaggaataagttgtagtgatggatagcactgcatggagaccacagttaataacaattgtatcgcatatttcaaaactgctaaaagaatagatttccaatgtcctcaccacaaaaaagtatgttggtgaggtgatggatatgttaattagctttaatgaatctttctataatgtatacatagttcaaaacatcacattgtacccaatagatataaagaattattatttgtaaattaaaaattaattaataaaaaattagaaagttgctacttctcaaatatactcacgggttaactttttcatgtggaaaagcaatgtcggtttcatcacaaacatccttctagttggtcaagtagattatttaacttgaattaatatactttttttccatgaggctaataaagacattttaattaaaactaaaaaaaaactccagttttatttttcttttttgttttctgatttagtctttgtaggtaagaagttgttcattattgacagagacaaaacattctaatgagtgatggaatttttactctccatctaaatatcacgttaatatctaacacaaaacattattgtcctgtttcatatagaaactgcaagtttattttgtttgaaacatggggaaataaactcccgttttgaccttctctttgttgttctagctgtgtgtcattgacactggcgtgacttgccatgggaaggtgtaatgaggcaagactgggattgtaacaattattaacctacaaatacgctatggcaaagtcaaggcaagccagagtgacacttctaaatatctcaggaaatagtactcatgtttgaattactcattttattagttcgttttgatgaatatgggagaaattaataactttttaatataaagagtaacctaatgtcattaattgggcatttcacatgggctgatagattgcccctccccacccccgcccctttggtggtaatttattgagctgggaaagcttgagttcggtgtagcatctggttttcagtgatatcctgctggtcttatccaattttccagctgggagcatgaggcacagggaggtcgaatgacttgcctaaaggtcacctggtagctcaactgggattataactcaaaatctttctgattttcccatcctttgctcactggaccacaaaactcccttgatcctgtcttctcaagcttgcctgagcaggaagcaaatgtttaggcctagaaaaaagaatcccaaattaagtactggccaaaatcatctttaaaaatgtgtgaaatttccattggtataactcttaagaaatacctcattttcattctaacacctgagaatatgtgtgaccatgggagtgttgtccctttccaaggggtcaccatgggaaagtccatacctatcactgtttggatgctgctttggccaaaacattttaggaactccaaaatttgatgcttgtggtagaatacaaccacttgaatatataatggaccttgctcatattatactcagaaacagggcacttgactccaccaagtgctataaaccatctggctcatcctgtagtagaactcttaggcttgctcctccctcagcctgcaaattttccccgggatttcctcatggctggcaacttttcatcattcaggtcttagcagaaataataccttctcagagtgagacttgctctaacctcctgatgtaatggctttctttgtctgatggccccatttttttcttcattacatttatcagcatttacaattatcattgatttcatcttaaaaattcggtatgtcctaactctgagcgtaggagtctgatctgtcttgttttccagcatatcctagacaatgtttgatatataaaagaagctcaataaacactttttgaaagaatggatagccattcctggtaaaagaaggtctctcttctccttatttttattatcattcaaagagtttcaaaagggatgcccatggggtagtgagggcggatggagatgaccctcagtcagccagccagatcaggtgaattaacctcgaaggtcaacaggatgactgatgacagctgtccctgtcagatcaccctctcatccatagcttcggccttggaattgccctcaggcatggcttgtgactggtggaggaaaatcagtcttgttatacttatagtcacacttcattttttatctaaattcacaccgcccactttcatcacccatctcatttatacaattgatacttaatgatgactggtcacttccaaaagccaaatccatactcacagactgacgaatatgcagaatatagaagaaagtctcccaatacctgaacaggaatttcccaagtttttgtattaacagacagaatatgttataatctcccagagtgatgcctttaaataaatctcttctaaaatatttaaggttgtcaatgtttttaagaaggcagccagattattttccagacttgcttgatatacactaatttgtgactttttaggggaaataaaactgtatggtacataaattcctgctgctggtgatgctacacaagctactctgcatttataaactgatagtcgggacatcattttatagatcaggagaaaggactgcagagtgactttctcaagagatgcttctgtgttattctggcatcccagtgagtgcttactgtagacattatggaagaaaggcccaagcacctgtttactctgccttgctatgagaagtcatttctgtagtgactggcaatttcgccaacaacgtgcaaaactgtagaaagctactgcatggtggcctgtgtgactgtgttggagaattggagagcagtgatctcaagcagtgagcagtttccctttcacttggcaagcagtcctctggggacattttgaggttaatggagaaaggcagagtgacataaagcacctgtggtaccattctttttgactttagctgctcttataaaaactactgctgcgtgctttcattgattcaatgtcaacgttctgaccaacctggttatgagacgtctagttcagagatataaacatgcagttatgacagtcacaaaacttctaactcctatgacaatctataactgtctggttgagtgaagtcaagccccaaattcatattattaatacaagaaagcatctaaccaacaattagaactaaaatgaatattgaagttaacttttctttgatctgcatatttcaggacagacacctgaaatgttcttcttagattctttcacgtggttacccagacagactgtacccctttgttgtgaaaagtgtagtaaataacttgttggctttttgagtggtccagtcattatcttgtcttccaacaattattttgtttttatcattaagaaagaattatgttgtgctcacactcattctggagaagtcagaaagtctctcattggtagggttggtattgagaaaaaagaatgtcccattaaggcatttttttgttcgttttaagccaacaaaaatgtgatcttttcttcttttttcataacttacgttaaagcaccacccaatatattccaggtccccagagagtcatacaatttctgtcatcaaagtgatgctgggaaaccaaactggggattattttaaaacagaggcatatgtctatattcggaagataaaccccagacacagttcaaacaggacacaccaataagtgtagtataacctcaaaagagagaaagcatgtttcttaagatcgttttcctaatatcatcacttggattttgcactttggttatttcttttgagagatggccctgtgtcatccttcaatctttcatagaagtgactttggagaaggaattgataacttatttcatatagttgacaatgatcttttccttttcattcagatgaatgattctgtagacccgtttcctattattgatcatgttgacactagaaggactctaaagatgggagaaaagtttgtgaacagagctactgaattacagccaagtcataacatcaagaatgtgcactcagtcagtgcctgattgatgatgttttgcaacacattgtgtgacatcatgggaaaactttcatttttattgcttttaggagtaaacaacctgattccttgggaaatactttgcactattttttctataaagaagcactttttttgtccccaggaaagactgctttatagttgcttgattttatgaggaacaatcagagggtatgattggaaaaaaataagaaaaaatgaaattccttctgatctgattcttcattcattcaacaatatctattgattgcctactaagttaaagtgcagcatagagtattatcttagataacaagtagtggatgtagaagttgtgtgatgattccattctcttgtggaagtagaactagcaacaattatggtatagttattgttgtggtctgaatgtatcccccaaattcatatattgaaacataattgccaatgtgacaataataaaagatagggcctttggaaggtgattaagtcatgagggtggagcccttatgaatggaaatagtgcttttataaaagaagcgtaagggagctatttacctcttctgccccttttgctcttctgcctttaggcatgtgaggacacagtgtttgccccactggaggacgaaggaacaaggcaccatcttggaattggagaccagagccctcacaagacactgagcctgatgttacctttatcttggacttcacagcctctagaattgtgagaaataaagttctattagtcataaatcaccgagtgttaggtatttccttatagcagcacaaatgaactgacagttacatccaggattttaatttgcaatggttcccacttccagccccaaacttggcatctcatgaaatagaataaatgaatactatttccagggaggaggaaagtacagattctggagtgtcaagatggctatgataattgatactctttgccccatattcctatgtagaaagagtaaagttggagatacattggccacacaattttatctatctccacaggcaaaaaaaaataaggatagaggtcctccaccttttaaatatcttgaaatgtcaagaaagagagagacatctgaaaggcacagaaaaagcgggtgggtaggagagaaactcaaacattaatggggaatagaatttctcttgcactgtccacaatacatatgtttgttaaaaagcaagaggcggggaagacatgcatgcctgatattgaagaaaagcctgtttgtgccttacacactggagaaattgttcaggaatagttcatccatgtgaaaatatgacccatgtcattttgccagagtcattaagacactgagctgctgagtaaggtccgattgggtaaattcaaggttctgggggtgtacatacttcctagtgcccagtttttctaagatgcagaaaaaaaatgtcagtggaaataaggttatggagtgccacttgcgtgggcgagacaaggtctcgatagggtgggaaccagccggatctcagacatggcccattcttttagattcttcaccattttcttagtgggcaaaatgagaaatagagaataaacactcggcaccagtagcaagaagagaacagtggtatttacagatgggaaagagggaaaggttacaaatcatttgtgaaatgaatttcccattctcttttgactattgtcatattcatgtttcataagctccaaaaccgtctggagataaaattcagatcatttgttataaaaagaaatggctttttagaggagcttagaggacatgaaagctacatttgaatgaataaatattcaaaggcgggcaataaacattgaataatggacaagcatttctttaatactgtggagaattgcatgaagtttgaggacatcctagaagaattcaaaataactaattgaaaaacaaaataacttatcatctagcagttttggttttaactaggttaggataaatgatcagttcagtctcagtgttaattttttaatagttgaattgacatttgtgatgggcaggcttattgccagtgtcccaggctctctcttacgcaagagagtgatagagcaatcatgcacttcattcaacaaatacaaacaaaatcttattaatctacaataaaccagacctttagtctctcgggacctcagtttccttatctacaaattaatggtgtgtgactatttgatttccaaattttgttctttgaattatgtaacactttccaccttcaacatttcagtaaaggggttttataatttgaatgcaggtcttggaactatttgtatttctaaaaaatatatgtaaaatagtcccattataatcttttgggaatactatctaagtatgtatgagaagaaaaattcctgggtttctgattagctgctaactatattcagagtttctagagtttttaacattttaatgtaatggcagcttacttttttatcaggaaaggaattgggcatggtggacctggcattgaacctacatggaccattcagttttagtgtggcaggttccaaaatgtcccctaaattaaaggcagaggatttattttaaaggactcctttgaaagggatatatctttctgcttttctgtcttaagggcctgcaggcatgcttcaagctacttagattaaacagcttgagaactcctagttataaaagttttttttttttttttgtcaagaactaagatgtggttttcaaatcaaattggcaggtacttacagaaccatggctctgagcgaaggagtggaaacatgagactcgtataaagatctcaccaccattaagaagtttcttttgagacgctggtatcagcccactgataaaatgtcataaaataactgccatccccaccttttataagagcaatccttggattagccagagctgctggattgtaataaggaaatgtgtgtttaaaagatgaattaaaggaaaatatgaccttcaggttactctggtctgttgatggggtcaggggaaggaaggttcaaaacctcgtaggagaggggtcagactgacactggatgcgaaagttcacaagtctgcattataaataatataagtaggaaatgagtgtttacccctctctaatgttagcaaactggaaggataagatggcttccttttgacgcgaaaaagatctaaatgtgagatgctattttaaacaatgaacagctgtttcatcttgaactaaaaagaacaaagaaaacaccatcagatctacatagaacatattgtggtttcccgtgtgtttgtgtgtgtgtgtgtgtgtgtgtgtgtgtatgtgtgtgtgttcccctcttctttttttacttacgataattgaaatgtcattttatcctggatgttttcttttccaaccagggacatgaaaagttaaaatattaaagaatttccttttcatcattttgaacaaaaacaacttttcattgctttaacatggattgttttctttgttaatccaacagagattaatgcttggaatgctaaagtgtgtacttaagggaaaaatcatgatggtccatgggtaatatattttaggtgggactaaagcaacagagtggcattctatcatagtctaagagattttcccctctggagaacagctgtaaacataaaggtagtttaagtcagtgacttcagagatttcaattatccagttaatgcctgggaatactagcactgcatttacagaaaaatttaggcacttatgtttagatgttaagaaaataaatttctgattttcagagcaaacagtttggaaatttaactcaagacacctcagatcaatatgtaagttgttataaatgtgcattaatatataaaattatttgtcttagtttgaattttgtactggaagttgctgaggctgaatgtatagaacaaaattttacgtatttaatgagcatcagttttatttaattttaattctccatagatattatttatgtttgacatcccaaatctaatttttggaaaaaagttaaaatgaattacattaaactttattcttccaggtaagaaaatacacacacacacacacacacacacacacacacacaaaatttagttcattttacctggaaacatattccattaactaagaaaggaaacaaacacactcaaaagtttatttacgttatctgtttctaaatggctggcacacaagattgtggccttttgtgtccttatttttttaatttgaaggaactattttgtttatctctttttggttatatagctgcagaaactatgtctaatattttagactgtttctagctctcttttttaactcatgacacacaattttagttaacttttcctgaggcttaagtctttctaatttttgtttttgttataaaagattaatttctttaaattaggaacaggaaattctaggccagaaaccactagctttcttcagatatagatctaaggataataacttgtaaaactttaaaaaaagaagaaagaagaaaaaaaattgtgcatgattttcttttttaatccagacttggttatagagcacattcataaattgtcctgtcaacctctaggacatgagttcaactccaattggtttaatggccacaaatgtttccttagaagaattccggatttctggatggaggaaagaatgtcagggattctcagggcaggttgaaaatcacccccctccccccagggtggtcttgggcggtaatcacaccccgctgataggatttggcagttaaaatagatggaggtcagcctgtcattttgtctatttaaataagtcacttgtgattaaggacaagcagcaagttttcttttttttctgtctcacttttgagacctttacttgcatctacttctctggtgtttctcttcttcttgtatatttctcgctttcattctctttggccttttatatggaaattgtttgtgtttttttcaccatatccccacttggagatatgaagtaggggacaaaatatagagagtaaaacttggtattcagactgagacttttacaatagtattatgtattttgtaacatgcagagagagtctaaactcaggagtctctgccatttccttctttgttagataagtcactagcatctacattatgtaatcaagttcatggtaatttctccatttgctcgggtcctttggtagaaaaccttattttaaaattaatcgatgtataattttgtgcaaatacccatgagggctgcatttgcttttaggatttttcttgaccacaaagtatcttcatgtgatcgtgtactttttcaaaaatagattggctgttacacaaagtggaatcaatgatatataagtctttgcatctgccaaccactttgctgaaattgtttaccaaatgtcaccctgaaatcctgtttctctttctcagaggtttggcattcaatgctcttctacctcttgattcttcctgctacctggcccatatggaagggagggctttcaaaaaggcaacaacaccttgctgagtgaaaatgaacttgaaataagtccagccacctcttgggctttgtctcatcctctgttcacttttttctctgttcatttctgatgcgtctggctttgtacaggtttaagatgatggtgctaacctcagaagcattctgtaattcttgcttcctccctttgggcaataatctcaggacagtgaaagtgtgcatatcctggaaatgccaaagggttagaaccaccagggcaatgcttaaccaacggcagacaggagttagagcatcatttgggcagacgattctggagcttattctataggactcttcaacatttctcaatggggttgagccccagttggtcagagttgtggtctaaatgcactgtgaatcaggatttcccagtcttctgttcctattcttggtatcatttcctcaaatgcacaatttgcacaaagctctagtctcagaatctgctttccaggagaatttggtctaaaacaaaacgaagaaaaatgaagccctaagtgatctttcttctaatgtgatttgctgcctcatattatggtaattaagtatagatttatctttcctaagaaaaaggtttgcttcttaacattggggacaaatatggtcagccactgctttatggcaagctctctgctgggaccgagggatacagtgttggaagagaagaggccactgctgtctagtgtttatcctctttggatgtttcctttatagaggctcaacaaattgctttcaaaagcaaccaaaagatatttcttaaattcacatataattccttcggttaaagatgttatacctgtgtttgtcacaggacactataaataacctttgacagaaagcaactgggtgctgtgggaatcaaaaaggaagccaaaagttaaagcccaccagggcagggtttctccagatgttttgaatgagatttaacatgaagcaaaaggcctggattgacagaggaaaaagagaaaggcattgcatggacagagaatgggaagagagaagactctctagactgtggatacctaagtacagatgcatagagccactcctccctgactcaggtcctacagaaagtgacatcctatgaatggttgataagggataagtgttccacaaaaaataaagttttggaataaaataaatttgagaaaagttgaatattacattcagaattcagagattctcagcacacattgccacattaaatatccccgagaagtattgccatgaaaaaaatatacccccagaaaactaactctgtggaagtgcaatcacttgcaattggatgttgttcaatcatcttgaggcacattggtattctagaaagtggattttagaaaattccggaagacagcaagcagtcctgcaaaatttagcaaggattggggatggagcatgggagtgcgggagaacttcacatactatatagatgcatttgggtttgacatgtcgagcaatcagatgctattatgtcactccaggagaaggcacagagaaacccctatttcttgtaagagaatttagcaaaccaaaatcactcttccaagtttatattggcattttcatagtgctgttagacttaccatgtccattgttgaaaaagcagtgtaaagggggattttatagactgatgcctgtgtttaaatcttaacttcctcgcttccttatgactttggtttcttaatgtctccatgcttctgtttcatcacttataataattatgggcatggtgataatggcacctaactcacagagttgttggaagaattagacacgatgaaataactacagcacttagaatgtctaacacagagcatgtgactgagaaaacagaacacatttatttttagaagaatagtattgtgtgatggcaaaggcacaaacttagggacagtcagtcctaaatttaaatgctgtcactgtactttattgggcttactaaattctgtacatcagtgttactactataaaaactgaataataatatatatcttacattgaacataatgataaaatgtcaaggacagggaacctgttcaagaaatatttgctggtataattattgttaatctacagtactactccacttcttattagtaacagaatattgctctgaaagcttcctcgtcttcttctgaaattgtatgaatttgctaaataaataaatgcatgagttaatagtcttctaactggggatgtcagacagtgagacatcaaagaaggtataactgacagcgaaatcatgttctgtgccatgaaaataaaaatcagtatattttatccttgttgtatagacagagaaattaaaacagaagactcatctccatgcattttgttttagacccaaatgcaatgtttcttatgttaattattttttaacagacatatagggtgcgaatccaataataaactttactgtttgaaatctgaatcatctcttagggattttgttgagaggcagatttaacttttcctttttataatgtattataataaaatcttttattctaaagcatttcttactagaaatcttaaatttacaaaataaggactctgtctcctgtatcaatgtcaaacaacaaagatagaattccaaaaccttttttttcttcttttttggattaatgccttgtcaggctttaatatagaccaggcctggaaagaccgttttgccaggagacatgcaagttgtgatcttgtgtgttatatgctttttcatatgaagacttatttggagaatgtttttaaaagaaacacaaaatttacattgtagtccatgcaacctgaattgtgcctcataggcttgtacgactatgtaatcacctagtgcctttcttgaagggacatcctcccttgggatgaatattttacaaaaaggacacagagcctcatgattattttggtccattgaaacatattcctccaagagtccaagaatgaattagacaactgcaggaacaaacgcattcttatttcaaaatttggctatcagtatgtctttatgtttaaatactctttgtcaatgtactgtaatttctaattcttataaccctaaagggacaaaaagtaattctttctatttgtgagttgttttagagtttatgaagcattttcatacacttcacctttgttaagctgtttggtgaattactttcacattttagggaatatggtatttagcttaaaaacattaaatgcaataaccaaaaaagtcaacacaagtgtttcataaaccacagtgatgcctaattccccactttcacagttgtttccataatgccctccaacccctcctttattcttgcaaacagagagaatgtcacttctagacatttggagttagctttggcaagagagatttaaggttgcaaagtaacatcgcatgggtttagggcagggtctatttccttgccattttcctgtttgagtatggactaatttctaacaaacaaacaaacaaacaaataaagaaaaacctaattgattaagatatgacataattcttagaacaaaattttgctctcttttaatttactatatgtagtagcacacaaaagaagaaatgctgaattttaactttatctatttgcaaaaatttctaagtgttttagtctacattgttctttaaatacatacacaaatatataaacacacaagtgcagcaaaaaggaaaagaaaaaccaacctgacagtttcttatgatgaagaacagattaaagctagccaatttgtgatgttattatacttggaaattttcaaaggaaagagccaaggtctctaaagactgcaattggaaaactttttgatattaaatgcatctcttattacacatttgtatgctaaaataagaaaaatctgtatagggcaaggaatggaagttctaaataggttgatttacatgtgcaaaacttaatttttcaactgaaatttcaaaagcattttaacaggcgaatttactattcttcaacttaatggtagccacatggctgaaatccttttgaaaatgggtatcatgcttgatatttatctaacatattatatgacttagagctctttgacaaatacattgaatcttattgtcccagctgatttgctgtgagaaaaagaaaagtggaagagattggtatcaggagagaaagtccagtattcaatgacagaattggtctctaatctgacagaacaacaacatcattaaaatttgagaaggcactttaggccttacaataatcagcaacccaaaggcagaagaaggctaaaaatagggacctataattaacagtctaaaaatagacttggctagtcatatggaagtcattatagtctagaggttaaagtggctgaggaggataaaaagcaaatcaaatattattgcatattaaacacactacctataaacatagtaaatactttacagagttcagctcaatccggtacaattttatataagaaaaatattaaagtgcaaattttcatttcctaatgatcaaagaagttttcttggaaaggtatgtttggctttcatccaaaagtcttcctttggtttaagatatgcctgtcatgctattgatacgatggggattctttctttcacaaaagaaaaatagagtgatttttagatcactttttctatttaggataaagacgagtacttccaacataaataacatttcccaagaacaagtaattatgcaaaatatattatggccaacaaagatgcacctagttcatggattcaataggctacaaagggttccacaattttttgtaagatgaaagctatcaatgtgtgtgtgatttccttcatttttattgttaatgtgagaagatgtaggaaatattattactattactgtcaatgggaattactctcacggttgcagagtttccaggcctttcatatgtttgcagggtcttacacttgttaacaacatttcctggaaggctgtgagaaaaccttaaatcgactccctttacttttaaacatctatctaggttaaaaaaaaaaaagtggatgtgtgaaggagtgatcagatgttgcctaaaatggaaagtagcatactaatgtggaaggaacacaagtgtcttgtctggggctgagatggggattgggaatcacactgtgccttgtatcaggtttatggctttagccaagagattgatttacctgtcagaatctatttcttaggtttcatctgcatagcggaaataatggtttgtggtatttacattgggtattgtaaatatcttctgagaaaatgtacatagaatctttagaaacacttggtcttggtacatgacattgcctaatagatgatagtagatactaatattgctgtttatcaatttcatctagttaaacataaattcttacatgttcataagacagatatgacaaagttgcattaaaaaagcttgaaactttatggataacaaatatgttctttctaatttccatcccttccattcaaatttcaagaatatttctcagctctccctattggttttaagtaatttttactttcttaaataaggtcattccattgaaatctattttttttgttccggtaatatcagaggtaccctgtatgccaaataataactctcatctgtgtattgattttatttgccaaactcatatgcatatgattgcttctgatttgtaaataaaataaataataaaatcttaaaaattataaaaatgaatacaaaaataaattctgcataattttttaaaaccatgtttcttaaatatcttaaatttttttcctaagtaacttgcctttctattgttattttccataggatttttccattgtatatttcctatatggttgttatttgtgaatacggaagtatcatgttccaaatgacaagtaactatcttactcaattaaattttctgttgaatctttggggaatctttcaaatgtcacaacatttgataattgtggtaactttctctcccttttgtctgaatttttatactgctcatttttctcttgtctaattttattgactagtaactctagcagaatgttaactctagtggtaatagcagacatcgttatatttttttctggcatttttgggaatgtctccagtgatactgtattaagtataatgctgagataatatatttcattagattagaaaagtgtctacctattgctatcttgttgaatgcatttatcagaagagattttaaactgtgttgatttttaatgtgtttttttatttttagaactattaatatgttgaattatattaattatacatttattaaaattagtgacttttttaaaagtcagaatctggtatgtaattatttataatattaactcatagtagttgacttttgaaagcttgtctgtgcttaacaaaatctgtaccaagtcattttggatgacatttttattaagttgcagcaaaatcattttttgaagtctgaatattttatcaacagaaacatcgagtacattatttactatataaaaataaagcagctttataaaatattgttgcttttttatatttttctttttttatgttattttcaatacatttatgagattcaaagattaaaaaaattaaagatacataatgaaagtctcatttcatcctctgccccgtcttctcagagctccctcttggccttttcacaggtaccactgctttcactttttgtataaccttcccatgtgtatacacatgtacagacaaatatgaataaagattctcccctgtttacacaacaggtagaagagtatgcatatttcctgcaccttgttttttcattagcaatatagcctcaagaacattccacctcaatagatataataattcctcattcttttttatagttgcatatcattccattatatggtatattatcatttttaccattttcctgtagtggacatttagaatgcctccaacatttctaaattacaatgttgaaatgaatagtctccaaaaatcaaaatctgtactgataaagctgataagtacctttttattttgccttgaaagaggaattgtaaattgatgtatggagatacacttggcaatagatatcaaaattacaaatgctggttctccttaacccaagaaatccacttctgggaagagattctcttttccctgcacgtttcagtgatgcttgtgttaaaaatcagaaagacattcctactttagttcttgcactctatttttatgaggaaatatattctgaagactttaaagaacatgataaatgcttattaggagatctatgtagtaatatgccaacctcctgagacccctccaagcatcatgttttgagtttttaaatcctacgctgtcatcgggaatatatttctatctttaaccaaataattttagatttacaaaccttgtaatatcaagtgccttcgctcagattcatactcaggtgattctcattatacttttctgttccaccacctcattccttggcctcactttaatttttttcccttggcagaaaagttcattctgttgacaaaaaaattatcacatcttcttatatttctttccttctctctcttcccacataatcccttgtgcctctagctgaatggttatttttatttctttggagttctttccttcatccttcctcattccttaatttaagatagttattagcattaatttataattaattttaacatatgtcatagtaataagcaagtaggaggcttcatcatgcaaataaatggctcccaccccaaaaatgagctctactagttccattcccttagagactatctcttttaagatgtctgttcaagggttcctggtggttacctccataattttaaataatattgtcataccactgttttctggatgattaactttcatctatttacttttttatatgaaagatgaggattaactcctatatatcacctaactcttgccaccccacttcttcccaattttaatagatttttaatttttattttattctattgaattactgcatatatctttaatttatattcttaaaattatttattttaagcatttgaagatttctttgatcctctctgtgtatattatgttacctttcgtccttactccttctgacacctcttttccccatttctactgtctatctcctgggtgatagttgtcaagtttgataacatttatattctgttatcttactatagtcaaatctctcctgccctttctgtaagttgagtctcacaggtgaaaactaataacacatgattataatgtaattattgttcattgtagagtcaagtagtgagttataattacagttgcttttctactagtacaaggtcttaaactcatttggaattgctatttggagaaagtgtctagtgccaagagcaaatacagtttcccttttaattctaaattgagtgctgtagcctatgccatctcatgaaaaacatttggtttgcttttctatttagataaatattttctttctttttctcctgtagttattacttgcctttgatttttctcattgagagaattatacacccgatcacccaatcttcttgaagactaaaattaaaacctatcttatccatggaagatgcccactgtgacaccactgaggccgtttattctggtacaaactaactgtctctatggttagtattataaattcctgtatagattatgataacactagatacttttatttttcagaattatattttacatttcctcaggtagttgctgtaatgaatattcttgagaaacttttttttttttgccttttgcgatacctatcctttcttccactctaatgcttacaacagttctatgtttcctatgagtgttaatttacatcggttgataatgcagcttccaaatgagatctacattttgattattatttagttatcttgattccatatgcagggaaatggtccactaaaagtatcaatgaaaatcactggttcaaggtctctaagtgtaattcctgggtcaatcacagccccccatcacccctatgtaatcttacccatttcctttaacaccttttggactcctttttatgtcttttgtgtattttgggagtattcattcctttccactcccaataccactttgttcaagtcctcatctcctctctagagctagagttaggtcagctcccaacagacttctctgctttaagaagtctcactgaaacccaccaaggcacaactttctctggctctaagatatacaatgtctctctaacaccttgcagctaaacttcaaactccttattctactacttaagttcctccatgatctaagcaaatgcgcctagtgaataataaggctaaacttaactagacaactttaaactctttaaatgcacattgactcttcccctctccaatctggcttacacagctccctcttttgaaatgcccattcccagtatctgcctcatgaagtcctccttattttcaaagacttcttcaagtttaatgatctccatggaatgtttttatgcctcaaaacagaagttgtatctcccttcccatgcttcctcctagcacttcttaagatcagttccttcttaacagagccccttgcatagtattcatttctatgtgagtgttaggtcccaaactggatgcatcttccctgagaaaaggggatttctatcaatattatgtgttcctcaatgagcccatcattgtaggaactccaaaattatgttgactacaagactgaagctataaaatgacattagttattcttacccttgcttacctcacaggggcatgggtatgccttatttggaggcaggattgcagaaatttatggagctattctgggatgccatttagttttattttttcctgagcagatgaatgactaggcacatagtgttcaggatacatttgaaaaaagaaatagatgaaactgcagccagtttaaacttccccattttttaatggaacatgatgcgagatgtttcattcatgtgcctgaagaaataaagacaaatgaaagggctgagtcaataaaaagtcaaaatatattttataaccatatataaattcaaacatgaaagcatttagtcattcatattacaggctgaaaagccctcctggcctagcattagaagaaattgtatgttttaattatcttgtggaccttattaaagttgcaagcttgtttctctttgctatgtgtactgacaaccatttctcacatctcaataaataataatagcatcataattgagagatgggcacttagaagtttcaggagaaaatatcccatgggagggggtatctatacatgagaataggaattttcccttacctgccaacaaacttggctacatgagcagacaatattttatgtctttcagcgggtgtggagagttcaaacattggcattgcagttgtatgcctgcaatgatgaaaattagattaggaatatctgtaactattttataaactgttggaaggtagaaaaaaacacaaaggtgtttaaagaaacagcctggtggtacaaggaagataggaataggggaatgacttcctggtagtcttggtttcaaaatagcatagatttaagattagtttatcaaataagggtcatctagcccaatttccttgttttgtacataagagaattgaagtgtgatgaagaaagtaagtcattacttgtactattttgtcacccgatatacaatttataagagtgaaaagtaggctttctatatcagataaaacctttctttgaatcatagaaggatcctattgacggaccatttcgtcacgtttctttcatccctaataccttgttaaacaaataagtagttttgccctttctttcaatcccagggatggtaagaatgaaatgacaccacaaacaattacgcatttaatatctttcagaagctagtacaagatcaggggcctttgacctagcaaccacctcctcactctcccaaccctgcttcccggcacccaccttcccagaatctatgaatagaatccaggggatctgtggattaagatgggaaaaaattgcactttgattctgccaaaagacaaaattacaacaaatttattttaaagattttaattggcttctatttctgattctagaatcaagcaacaccttattctataaaatagaaggagtgtttctatgagttaaacagaggaggttggctttgtaaaggaaaggagaaacagagaacagaaagtggattggccatttcaaaattacttgccttgtgcaggttaaagcagacaggacttccttattattcctgctaaagctggcctactgggggacttggcaattatctctctttctcctgattttttgtaacgacagataacaacattgttttggcttggtggagtggaacgttagcatagtagctccattttgttttggtctggtgtgcttagcggctcagtccaaaccaatgccctcttataaattttatttcacaatgttcaccccaaatagaacatttctttcagtaatgaaagtgagcacaaaccacagtaccaggacagagatatcttcatattgaatgacagttgttgcaataccatggtagttaacagattcacttaaacttattagatactcattaatttactaatataagctattctttttactacatcacacaaatatgttttttaaaattgcatttatagaatgggccttcttagaattcctatgtattttatcttatgctttagaaagtattattttcgtaaagggtcttaggcttcaccagtttgccaaaagacttatggcataaaaaaggacacaaatttctacactaaataataccttaagatgtttagcttttgtttatggctatttaaaaaaattatttccaaatatgcacctttgaaactagttttcacagtgttttctacttaattcaagctattattctcattgacattgattttctctaccagcctccattagaaagagagcttatgtttttgtagacatttttattaccacttctaaaataattacaatgttgtttttgtccaggaatggtgtctcatgcctgtaatcccagcactttggaaggctgaggtgggagaatagcctgagcttaggagttcaagactaacctggacaatatatgagaccttgtctctactaaaaatcaaaacaagttgctaggcatggtggcacatgcttgtagtccaagctgctaacaaagctgaggcaagaggatctcttgaacctgggagactgaggctgcagtgagctataatcacaccactggcttccagccctgccacagagtaagacggtgtctcaaaaaaaaaaaaaaaaaaaaaaaaaaaaaaaaaaaaaaaaaaaaaaaaaagttgtttcttccaatggaaaggtcattggtttttaaagaataaatttaaagtcttttcaaaatgtgctttaaaattctaaagcttttcctaatttaatgctggaattattcccaaacttcatcaattactgatcaagattgctgatgcaaagagattaaacattactcttaaatctggaagaaattatacaaagacatactttttttttactttatccttatgtaaattaatttgtagttgtttgtgaattatgcataatatccatataaataacaaggcaccttaaaactgtatgttgttgtttggacatagaatatttcttttctttatttaaacaaataaatgagtctgaggaattgttgctgccatgaattaggatttaatcatagcaaataatatccaggacactatgaattaagcatgtaaatgatttaaaaattaagaataatctctcagatatcaattctgtatcaggctgaatttttaacagcttgcatagttttatctatatctttctagagatcaaatatcagcgagtgggaaataagggtcagatgacacaagccaaattgaaatgtgcaaatcaagcaacacttcacacactactcactttttattcctgatgagaatgcagtctgggagtcttataaaatttttgccaaggcagtcctctggaaaagcaaggtgtagctgcctttacatttcagtttgcaaataacccactggtgcttttttcttctatggtcactgctggtcttctaaacatgtggtagctgtgacacagtagtggctaagtgatcacacatcattacatcgtgcatacgtgattatttatgccttctcaaccacagtgtaagttacaagcaattatttttctgtctcctcagtgtaattacactgtaatctacagggacgtgtaattgcatagatgggttctgtactgaattacgcagctctcaggggctatgtgagatcctgggaggcttttaccagctagcagctgggcggtctctttgtgtaaacctggtggcctgtatatgggttatgctggagggagatttgcatcccagatgtgatgttgggctgccaagcaaacggcctaagggttagagagcctgtctgtttgatatcctgacctcatcaaatgacccctttacttcccatcctcagattatgaaatgcctttaaaaaaaaaggaagctcctacggaagcaaaattttcattggtggaaaatttctttacgatttagaaatcttttatttgtcattttcagattgcatgtacctaataagtacagaatgctttaaaatgtgcaaatcctcatacttacatctgtgcccaaagaaaacaatgaattggtttacgatgacaaaatgctaaataaatattacacgtttctttttttttaacaagaaacaaacataacctgttaaatgcgtaacctgatgatgtgataatttattactattcctagtgtgttaatctggaaaggagcaatctttaattgtcaagttatttgtcaagtgccttctaagagagtcactgaggtgccagagtttgtccaaatgggagtcagagaaattcccaaagagaccattttacagcttggatgatctaattctctgagaggaaagcaagaatgacataggtaaaaatcatttattccttgtctcactggctgatcctctcctaggagagtttacgttttcattggcattcactacttggcttgatgatctattcaggttcagggacagtgtgggcaaatgcatgtttttcatgcttcttgtgggtatgtatatatatttcactgcatgccagaattcttgtaaattcaaaaaaaaatttgtttggaacaagaaggtcttcacttaggaagaaggtttttgggagaagtctgaggaattagagccaaagcgatgatatgtgattgaatcctgaaacaaaattgtaaaatccttgctttagcctttggtgggaactttcaagtaagtgtgtagttatataattcactaccagaactttcccatagatttataaatttctggagctatttttctaaaagaattttgaataaaaggagtgtatgatgaattcaaaaaaatagtcttctcccaaataaggctattttaaaaatttgtatctcaaatgggcctttattcaacaaatggggcattttttttttgtttttgctaatgtatattatttttcctttactattcatttgccttctagtatgtttttatgatttatttctttgggaataaacattcataggtagataaaatggatggatagatagatatagaaaaatagtgaaatacttctgttgagttttattataatatatttataagagcaatgcttctaaattggccacctctttcacatatcatattgtcttagttcattttctcttgcttataacataatatcctaaactgggtaatttagttttaaagaggaatttatttcttactgttgtggaggctgagaagtctgaaattgaggggctgcatttgattaggtccttcttgctggtgcggacgcgctgcagaagtctgaagtggcacagggcatcccacggtaagacgatggagtgtgctagctcagatctctcttcctcttcttataaagccacctgttctactgctgggatatcccattaatccattaacccattaattcatgagtggattgacccattctataaaacagaggcctcatgacccaatcacctcttaaagggcacacttctcagtactgccacattggggattaggtttcaacgtgagcttcagaggagacaaatatttaaaccatagcaaatatcaatcacatgtctttggttcagactttttttcccccagaaatggctatcacaaagttctctgaataattgaagattttaatgtatatcttaatatttagttactttaatggcttgccatcacacacagttctaaacatgtgattggctttaccttgtaagtctttaatttcttgttgtgtaatggtttccttagccctaaattcattcactaataagtcatatgttttttattattttgtttaaatattatttaatatttaaataataatattttgattattactcattttttttattgtggaaatgtggcactatccacctctaacctggatgctcagccttatttagattgtcatggatttggggtttggtgaaatgctttgagtctttagatcttttgtttgatggcaccagcaaatttaggaactccagtgacataaattagagattcagatgaatctgattttggctttgtgtggtatataaaggtcaactctctgccgtccacagaggaattcaagtatgctctaattacataaaaggcaaatatctccctatttgtatagacattaaggactgagacaaatgtaagttacactccccccaatcatgttattctataactatgtgtcttttataacttgtgtaatttattgaactgtcaacagaaaaaggtttttttaatattagcctattaactgataccaaaaatcataacttcatagctttcatacaagaacaagtttatttgcttgctcatcagaggttcattcccagttttacaaaactctttcaactggagaaacttgaattcaatatgccttatattctttttgtatatgtgtgagttttttccatttgtttgattgttttgtcttttttttcctagagttggactttatgttacttcccaatgactttaattcacatctgtaatttgggcttgtttcattagcccaaatcaaaataatattaaagcaaaatcaaaggtatctcaaacaggtagaaaaaggcaggggcatatcttggtgacactatctaatgggaggaagtatggccttatgagaagagaacatgtaatctatggctgtgctgcccatgatgggagccactagccacacctggctgtaggacacttgaactgtggcaagtccaaattgagatatgctataagtgtcaaatatgcactgactttgaagatttggtatgaaagaaaacataaactatctcaataatgaataatttttaaaattgttactcattgcaataatatttctgatatattggttaaatcaggcatattattaataagcattcacctgtttgttgttattattatatagctactggaaaatcacatatgttgttaacatcatatttgtattggacagtgctggttctaaaggtaaaataaatggactttattggaagtccttgattttcttgccagcacagtttggctctgaatgagacatataattatgaaagtcctcagtttcttcatctgtgaaatggggataataacacttcccacttattgacataataggggaatagctataaggattaatgacccaaagcttgtaaaatgttgagttctttggatcttctacagtgaaaccaacttttttttttttaatttccctggggactggactatgtgaataaacaaatagagtgcatgggaaaacacccacacactcacataactttggcccatttttccctttagtgcatttatagtggctacaaagggcaggaaaaaaagtcataagctaaaaaatgccaaacacgcttctgtcaggtttggctaagctatgtatggcctaagtatctacaattcacactgggccgataattgctgaggctgtgaggacatagagcgtggtggttcattttacatttatttggtatatttgaaatgtttgcagtaaaaatgtgtaagtaaataattattattctaccctatcaaatctctttctttattttttagaatttcttttgtgctttattgttgtatgctgaagatctccttcacaataaattgaacacaaagccattctgccaaacaaatgttttagccctgaattcaaggttagaataagcctttctctccccatgatttgagagcaaaaggatcccaaaacatgaatgagtaaatgaatgaggaggagtaaataaatgaaccaggaacagtaaataaaccaggatcaataaatgaaacaccttaattcctgctccctaacttttaatgttttaatagtcaggatttaattttcttgatatctcttttcctatttgaatccaaggattttgtcttttccccagtctcagaactgatgatgtggatatgagacatgcttgtttttaagcacgacagagctttatgctgccaagatggatccaggttcttcctgaaacacaggaagcacagagtattttcatcctctgaagaggcagcctcctgacccgctggagccagtgcagtcatgctgagtggtctatgttttcctcttcctttgctttgtacaacggggaagtcttgtttgatgtctaaatatgaggatgctctaactctggcatgcctgccaaggcctgaatttgtatccgtaattgtcacatcctttattaggagcaatgtacttgcaccattgtgataggttttttggggcggaataaatcgatgtcagcaattatattcatgcatctatcttaggcatttagctgaaatatccttcaaagaatggcagcactagttaagaatagcaattagacaagagaagtctatcttctcttgaattagtcgatagaatattgcgagtgtgtgatataacactagaataatagcttgaagctatacagttaagtgatgataatcatataccttagccaagagttctaagaaaattcaagagacaatctaattgtgtccattgtcttctagtaagcaggtaactatcctcattttacaaatgaaccctaaggtttggagaagttaagtgacttgactgagccacacaggttattgggggtgaaggtgggttgggggcaatactgaatttatctttgcgagaaagtatgtcatttaaggacattaaggagagtagtgattgtaaacagaagagtagctattgaacaaacccagcccttgtctaactcttagaacaaatgagaatgtgttagagaaattaaagctgagcaactgtttcaccaaatgggaagaacttctggggcttaaacaatcccctaccttggtgctgtggcatcctggaggtccagtgagtgaagaagatgcttcagggtccagccacatgtaccagccaggactgctctgcctggcaagcaatgtgaaagagcactaagcctggtagtgcagccgtgcctggaggggtgggcttgggtcaatgtcagcatcagtggaacccacagtgcccaggaagcacagtgacatcaaggtccccagcacgccacatcagatgagtggcagaggagccacggggaatagaaatgcgtaagcacgtgtgatattctacatggtcagctttgtaggggcctggagaagaggcctgagaatgcatgtgataaccaatacttgtgtctgttggtagtgactgatcaagttaagacatatacaaagttgagatagtagcaaaaactcccccaaaatacctcggtctatttgggggtatggaaagagggaacttgaaggtcccagggacagttttacaaaaaaaggcaattctgtttctcagtttgttttctactgaaagcagaaccaaggaaaagatttgaatgcaagttgatttattgggcagtaggtcttaaatattaatgagtacaggtgagacaaggaagagagatggacaatgtaaaggtgtcttgtctaggtttcctctgtaggcagtgggacttggttccaccaggagttcccaataaatggacataattccttccagaactgtccacatgaaagaaaactggagtgctttccactggctcccatccccattggtggagagtttcctctaggggctgtgcatacacctgaaagccagcattagggaatttcctggcgcagagagctaaaggacacatgcttgcatgcttgaggttggaccacgtggggaataggtaggtctgaattcacttggaaatctccaaagcatattcagctgccctgggagcccattgagccatgggtaggggcagaagcaccagatgcatttgctgtagaaggtggtgaatcctgtgactgttggtagacaaaagattgaaatggacacagagaagagcatttacaaaggctcgatgacatgaaagagcaaggatgactttataaatttaagcaagtctgtgatgttggagcataggatgagtaaagtggcgagtccagataaaggtgtatatcataagcagaagacaaaccgtgaagagcctcagagtcattctatggagtttaagttttatttttctggaactcagagtctaagtcaatggtatcctaagtggaatttcttaaatatctatttttgatgttaaaaggaaagaaattgagcttgacaactctttaatatatggctgaactatagcacttttcttcagtcaaggcactccagagttaggtgccacatatgagtaacggggatcttgttgatagggtgggagaatcccagggtggcatagccatgagaaacaccctccctattcacccacagagccattttgatgtgttgttcgttaggtgcacctggttaggcggaaccttggatttaattattggttttcattgaaattcttctcacaaaatggacaaatgctttgaaaaggatttctgcaaagaaccatgatcatgaagagaataccaatgaagcaataatgagaaaacagcagcaccagtacactgacttttatcctactcttagggtaatttcttcattaatcatatcatgatgttataaacaatgaaattaacaagtatggcaagaagtaggtccaaaaacagcagaaaattagaaatgatcaagaagactatgtgaggtatgggttaaaatggtgattactgaggatataattcaggccacaccttaatagaacattgtttcttgagatgttagctatcaatagtgtgaagccattttagatatcaagctatttagaaataggatattacttcaaattctttttcatgtttctatttttttattatttaaatcacacatataatatactagtatttgtatataatttataaacaaatacatgcgcatatacatagacaggtctacacacacacacacatatatatattttttgtactttgggaggtgatttcaggaaggacacatgagaaagtgaggaagtgagacagggaagagggaaatgcccataaagagtgtgggcacagtgggcaagaagtgcttgatcctcttggagactattgaaagaaccatgtagaatgcatcccagaattgctcactaagcgctagtaaactgttgggttactttgcactgactcacatcccttattggtttacccatgaagcatttaatcaccaggtaatcactggcttttccaagcttctgctacgtgaggctgttcaagattcctctacccagtggaaagagagacttggggaaagctttcaggcagcaagaagaggacacagtgcctgctgagagaagaggtgtcagcttgctgctgggtactctcccacactcagataaaaacagagctggatcaaatggatgtggggtggagcatcaatagcatcaactacaagcttcatcaatattctaagtgaaggaggtatcttagaacggacatgtggtaggtagaggtgtgagccactgcacccggccccagcagacacaagctatcttgtaaacttagcactttgggaggccaaggcaggaggacaagttgagccaaggagttcaagaccagcctgggcaacataattgagactcccatctctacaaaaaatttaaaagttagctgggcatggtgactcatgcctgtagtctcagctatgagggaggcttagatgggaggataacttgagcacaggagttcaaggttacagtgagatataatggcatgacttcactccagcctgtgacagagcaagacatttctctgaagaggaagaggaagaagaagaagaaggaggaggaggaggaggggaaagaaggggaaggggaagaggaagaggaagaagaagaaggagaagaggaagaagatgaaaggtgaaaggtttggacagcagtgtgatgatggtgttttggaggaataagaggctggagactgggagacctcttaggaagaggttgtgataatccacatgaacagtggaaatgtatcaaaggggcaaaatctacagatatgtatgggccgaagtataaaggggctggtagctgatttgattgctggagggtgaaagaagaaactgaaggatgagcctcctattttgacttgagtgacctggtttataatggcaccaaagggcagaagcaagtcaaggtgggaccctatgatgagctcagggtaagcaggtttggtgtgacccatcagaggctatctaggaacatattgctactagagcattgaatagaggtatcaggaatccaataaagagttcccacattaaaaaaatgaggaaactgggctggctcatgcctgcaattccaacattttgggaggccaaggcagatggatcacctgaggccaggagttcaagaccagactgccaaacatggtgaaaccctatctctactaaaaatacaaaaattagctgggagtgatggtgggtgcctgtattcccagctacttgggaggctgaggcacgagaagcacttgaacccaggaagcagaggttacagtgagctgagatcatgacactgcactccagcctgggtgacagagtgagactccgtctcaaaaaaaaaaaaaaaaaaaaagaggaatctgaatttgtatgacttttaagattcttttattattaagtttaataattaatatcctaactccaaattaccataaccgcctctcattatagatttgtcaattcaggagttaggcctggaaaaagcactcatcaaaatgattaatatcactttaaagtgaaaatattttctctatatatttcaacataattaaaaagatgtttcaacctgctgaattgaaaaatagcagcttcagttacagcatatcaaagataattgaatccttattcaattattggagcctaatacaaattaaaaaaaccttgcttttttaaaattttgttaatttgtccacaaaaacatgatttaattttgttaaccttgatggtgctatgtattataaatccttctcaaacttttgtatgtgcacaattattattctcatggggaatcttattaaaatctaggtctaattcaatgggtctggagtgaagccagagattctgcatttatagctcccaggtgatggtgatattcctgattcagaggtttataggatataaaataaacaaaatgagatgttcatgcaatcagattttcttttgaaaaaagacaattggctgatttttcagcaattcatctacctgcatccattttctcttgctgtgagttgaggtaatcgtcaccggctgccatggaccttattgtaaaccctgtggccatgtgaacctgggagatcagagagaaattcacagagtatgtatgtaacagagtgataaaagaagagaaatattgaaaactataagataagaagtaggaacagatgaatgatgcatggaagaaaataagcaaagatgcaactttatttaatatttactatttttggaaaaccattctaagtttatttcctgtgagttgatggggaaaggagaaaggatggaagaattagcaagcaagagaacagcaactgcccaagaaatacaattccaggtatgctacctattgattcccaaaaggtagtttttaactggcattgaagtatacgagatttactggccctgtttactacaaggaagattctttttctttgtctttagagattcttaatccagctcactgcagtgggccacagtctaatgcattttaaattagcaccttaaatatgtgttgatttggagcatagtttgagaaacactgctaaggccacaggagaaagggaatatattgccaaatatttgaagccaggaagatatactggaatctgcaaaaaagcactttgggaaatacaatttaaaagggcttccagaaaaaagatgtaggcattattattgggttagcactagagaccagcacaagcttcttacaggagtttaagatggtgtttctcaaatttaatttgcaaacaaatcacctggggatcttgctaaaatgcagactatgactcaaaaagtctggcaggcctgagattcagcatttctcataagctcctagatgatgttgatgctgcagcaaggatttaaataatgagatgaaagaaatttgttaagtactagaagtctggccatttaaaattttcttggaggaaataaagtaatgctggctgacatttgcactcatatcattaaacagacaataataagacatattcgtttatcagtttaccatgggacagttgctaagaatgccaagagacggggctaaagagtgacgcaatgatcaaagtcagcgcagatggtcttggagtgtagatggggcaatatgtgtgtagccatcgccagatagagggaggtgggggtaatttttgacaaattagcagttattgaaagtcactagatagaacacagcctccatgccttcccctctggcaatccctgtttctggtttagctgccatagatcaataaaatatgagtgtgatggggcaaagagcaaacacaaatctctagtgtcccaaagctaacatgaatagaaaggggatcctgaggtctgtagagtcataagagagttgacagagaacaaagttgctcacagaatcaatggaactcttattcaatttcttgcttaggaaaaagaagcccatagaaagagccggttttctgtaagtgaatgtcttaagagatactcattgtcttagtccatcggtgttgctataaacggctacctgaagctgggtaatttataaagaaaagaagattatttggctcatggttctgcaagctatgcaaaaagcatggcaccccacacttacatccaaagagaacctcaagctgcttgcactcatggtggaaggtaaaggggagcccaagtgtgtgcagagataacatgacaaaagagaaagcaagagaaagggggaggtgccaggctcttgtttacaaccaactgtcttaggaactaatagagtgaaaactcactcaatatccagaggacagcaaaaagccattcatgagggatcctcccccatgacccaaatcctcccccagctcatttaggcctcacttccaacactggagatcaaatttaaacatgaggtttaggggaacaaacatccaaactatggcaatccctcaaagaagtgaaagtaagagaattcagttttcttgcttgattatttggtctttttgagattctaaccaaataaacatgcaaaggtggatgagtttgaggtagacagtgggggcagccagtaaaaacaactagggccattaagaagagataatcaataaacagaactgaagaaaaaaatacaatggagagaaagacaacactaaaataatttacacagatatatagaccaatggaacagaacagaggcctcagaaataacgccacacatctacaaccatccgatctttgatgaacctgacaaaaacaagcaatggggaaaggattccctatttaataaatggtgatgggaaaactggctagccatatgcagaaaactgaaactggaccccttccttacactttttacaaaaattaactcaagatggattaaagatttaaacataagacctaaaaccataaaaaccctagaagaaaacctaggcaataccattcaggacataggcatgggcaaagacttcatgactaaagcaatggcaacaaaagccaaaattgacaaacgggttctaattaaactaaagagcttctgcacagcaaaagaaactatcatcagagtgaacaggcaacctacagaatgggagaaaatttttgcaatctatccatctgacaaggggctaatatccagaatctacaaggaactttaacaaatttacaagaaaaaaacagccccctccaaaagtgggtgaatgatatgaacagacacttctcaaagaaagacatttatgcagccaatgaatatatgaaaaaacctcttcatcactgatcattagagaaatgcaaatcaaaaccacaatgggataccatctcccaccagttagaatggcaatcattaaagagtcaggaaacaacagatgctggagaggatgtggagaaataggaatgcttttacactgttggtgggagtgtaaattagttcgaccatcgtggaagacagtgtggtgattcctcaaggatccagaactagaaataccatttgacccagcaatcccattactggatatatacccaaagatttataaatcattctactataaaaacacatgcacacctatgtttactgcagcactattcacaaaagcaaagacatggaaccaacccaaatgcccatcaatggtagtctggataaagaaaatgtggcacatctacaccatggaatactgtgcagccataaaaaggatgagttcatgtcctttgcagggacatggatgatgctggaaaccatcattctcagcaaactaatataggaacagaaaacaaacaccacatgttctcattcataagtgggaggtgaacaatgagagcacatggacacaaggagaggaacattacacaccagggcctgtttgggggtgaggggataggggagggatagcattaggagaaatacctaatgtagatgatgggttgatgggtgcagcaaaccaccatggcatgtgtatacctatgtaacaaacctgcaagttctgcacatgtatcccagaacttaaaatataattaaaaaaattaaaaagcaaagataaaattagggttatggcatctaaatgattaacggatccacaaaaatggcaaaacaataaggaaataaacttcagttactgcatgctggtatataactgagaaaagataagtcagttcttatcaataagttcattaagcttgtgaaaatagaagcaagtatttagaacaggaacagaagtattctccatttatatctaggtaaccgcagcaagatattttatacagtgtgagaagtcagtgtggaactccctacccaaaacatttgaattaaaaattgaagatgtcatcgtattaaaaaaagtgagtagctatgaccatatgtcatttgtcagagtgtaactatcctttgcttgttatcttatgggttcttttcaaatccttattctgaaattaggaatgtgcttccctgataatagaagtagcccaaagtttcccaactaaattatcttcttctaaacatgttgatatgaaaatattttctcacttatctatgctgatatctttctgaaatcttgtaaataatgaatgccaaagaacaaaagctatgaattggaacctaacagaaatgaaaatagctttaaatgtgagcttttgaatcaacattttaatctaatacataaagttactttaaaaaaaaaacaaaagaaacacaaaaatatttggaaaaaagtgatagtttccaagaatactcctctaaccaaattttggaaacatttttctctgcattttaaaagacaatctttcagttctatatctgcagtataacttaaaatgttgttttactgtttttccagaaacattgccatttcttttcagtgtaatagttttaattaattctcttattcataagtgtcatgtattttaagctgacacttccaggaagtttttagaaatttagacagatcagttatgaagaaatttgagattttaaaattattattattttatatacttctgtggaaccattaaatatgcttaaattccttcaaggttaggatgtttgaaacaactttttgaacattttgtaaaattaaatagaattgctcttctagaaaattttatcagatcaattttttttccaaaatgtgtaatatatctgagttataagtatctcataattttaccctcctaatttctcattctggcctgttagcaatcaatattgatgtgtatttaatagtgtgaatatgctaacaaattaaaaggaaaagatggtctcattcttacctcatatgaattcattaaataccttcttatgggcattgctgtgccaggtgcattgcaaaatgagttaatcagtcatggtctgatgatcagatcctataatcagtttacagaaatgtgtttcgtagcacagcaacaggataagtctgaaaacagttctgccctaaacattggatctaagcaatgtattcttactactactgccttggtgcttttggctcattgatttattccataaacattggcatgtccttgagtcaaccctgtactaggctcttgcatatgaaatagtgctaggatgagttcatatttcatggggattgatcaacaacaaataattagacttaaatgcattgagtgttattgtaagttagctataaaatgctgggaaaagtcagagaaacctaacctcatctagcaggatccctctcaatgggactgtcatgtaagaagagttttgaagagtaaataaaaaatgtgttaggcagagaagggggaaaaataagctatccaaaggaacagagatataataccacatcaattgtcaagttttggaggaaagctagtgtgggtatagcataccgattgggaagcgaaagtgataaaagctatggctatgtaataatcagggcttagatcacagaaggaattctataccagttatataagtgagagttttgaggtgcatacaacgcaattcaaaatcagtgccatggaaacccagggaggagagagtttcaaaaaggaaggggtggaaaagtatgacaaactatgctgaaagaataagtaaaatgaaacttggaattggaccacaggatttatcagtgactaaatctctgttaccatagtgatagaatagtctgtaagacagtgattttcaagttgtgacccacatgtcaacatcatccagaagcttgttaaaaatgcagaatcttaagcccatttcagaattactgtgtcagaaattcaggaattagggcccaagatctgtcacagaaaccctcctggagattgttatgcaagctaatatttaagaaccacttcttgagtgtgactaagaaaaaagaagacttttttgtggcttgggtttgaaagaagtaaggtcaaaaagagtagcctgccctttcagaaagtttgtcagaaaaaaaaaaaagtacaaaatggtagtttggggagggggtggtattaaggaagcataggaacccatcatctattttgtttattgatggtttttaatttttctaatggtgtttttttttaaattcacttaagttttaattctttcaacagtcaagtcttctgagtttttgtggttatttttcattgcaaacttattcacatgtatttccatattttctattcctttgccttttttctttacttctttttcatatttaaaaatatacatctggaatttattttactcatcactggaaagagtggctctaatgtgatatattcttcccctaaaagctaatttcctcaagattgtttattgactattctatcccttactcaatgttatgagccatttcctgtatcagattttaagttcttatatacattggatgcctttcactgtggtagacaactccattatttttgtcttctcctgagcagagatgccgcagtattacctcctgctaagtttgtgatcagttaaatccccaggttgtttctaaattaattatttcaattattcagttcttatgtggatatcagtatagatacaatttttcatttcttatattcaattcttatgtggatatcattacagataataagtataaaatatttaaacctgatttaaagctggggataaatttcaactctaggtcagtgattctcaaagacctaggcttcatctcatttcagggaccctgggtctctgtcttctgtattagctcttgaggtaattctgttactcatggaagttggagaaacactgctctaggtgctttcagattttttttcattttattattattattattattatttgctattgtgaatacctgaatatagttggagcagttaagccagtcttcaaagtcttactgagacccagacctacttacacagagacgaccatatttgcctcagtacttgaatatatgttttttaaaaagtgattcttagactgaattatccagagagaacatcaattctttatcttcctatgacaatagctgccttgagtaattctaatggcttttctaatttgaaataattaacaatcataatcagatcaacattttggagtaattggcttgtaattgcttctgacaattaggggttgggagatggataagatttagagatggactgtatttataaaatctgtgaaattaaaattgcctctaaggtaggatttgagttctagccatattgatatacagtgagtagggtagtgcttatctcttgatttatgtctcttaaacccaggttcaacatggatgtctaccagtttttactgtacaatgtagatatatttgattaaaacatatttttactcgtaaaatataaaaaactataaaatattagcattctatgtagtttattttaaaaactattttccatgttagagggaaggggtaattttctggtatggaaagacatcgggttttcaaatatttatcaaatatacatcttttagcaaaacttaaacacatttgaccaaataggttattttttcctagagtattttaaaccatatatatttgaaggcaaaattaatccatctgcttctgatttctttacactaaactaaaaattgccattttaaagatcaatttaacagttgtgaaatcctttgagaatttttttatgcgtgtgagaaagttaaaaagacctttgaaccagagattgatagtaaataaagcataaatattaaggtctgtagtttggattttggaaacaaaggtattgttaatatctaaacatggggaagggacatgggggaggagttgggaaaacccctttatccaacttcctgagaacgcctaagcattgtttcatctttgtataaggtatcgacagtagatattttaaaatagagttctgctcagtcacaacattaagtttcttatcttcagttttcaaaggaagcatttctttctcttctccaccttttttttggatgaatgccaccataggatcttctgggaagtcacctctcctccccacacctccagggcctcttatcccaaagcctaacctaccagcaagagatacctataaagggtttgggttgagtattggaaagtgcctaaaaaggaaaatccaaaactgtaaatgtacagtattattaaggcaaaggatttttaaaaacctgtgaagtaacttatttttctaaagtactatagatttccaaagtgcttgccaataaactttctcattatagtggctctaataatgagtgctgacatgtgacttaactggtagagggctttaatggcaattgaaagaatatttagtacttggcccatctttacactgtattacatttggcactgcgtcaccagctataaagtctaggataatcctattgttacatcaaattgaaaatccaatttgcctccaacaacaaagcactgttacatgtctatgcctctttgtaggtgtcttagaaatgtatgccttaagtacaatgatgttgtgttgaaaagcattgaattaatggttcagggacttatacaacccactctaaataaaatcctcttatcatttctgaatcacaaagtcaaaattttatccattttaacaaatgcttcatggatgactgctacctttttaaacggacaatttgctatgaattataaccgaattgaacataatatctcagacattagcactttccatattacactgacaaaattcctgatatgtgctgtgatgtggttttagtaaagaatatatttctatttgttagattgaaatcctttcttaaagtcccctagaactgtcaactctcccaggctcactgagtatctgtgacatgtgaatagttcaatatgtggtatggtcatttccctattctaaaggtcacctggtgaataaaaccatttagttaaaaaaggccattgaaaatacacataactctctcataatgctaggaaaacactaaacagcaaaaggatatgggccacataatagagtaaatgtcatgagttcagtatttaaaatgcgctctattcctaatgtattacactttcaggaagtgtttgatggactgatatatttacttcgtggttttcttctgagtataaagataagttattcttttttttaacaaaaaaagttcccaatgatgtgaattcagtcaaagagggagaaagttgtgggtaaagttacaaccttcactttatagatgtgttattttcataaagtcatggtcagtaacccaactattccttgcaaaagcatatttttccttctgcagctagtcttacgcaaacgtgaaatattcaacaaccttgatgtcataaacctttgctgccattattagtaagcacaagttttagagttatattttattaatgataggccttttaataacagaaatagactataaaatggtgtttttaaattaaacaattaagttttggatactcgctagctacacatcttctgaaaatcaatttatttttgtgagcatttcttgcagtttttctttaatagaacaagggaagttttcatgacagtacaagtcttcatctatctccaaagacttcaagtttaattcaagaatagattaaagacatatacttcaaattaagttataagatttgggtatttaaaacactttacagtggaataatgagtcttattttttcatctcacttgtaaacttgtcttgtcattcaaagttgaaagtatagggactttacataaatgtacaggatgttgccattgtttaaaataatcttggcttccttttatgaactcatattttgtctcaggtgtgattatttatctcagcctaaacgtgattatttgtctcagcctaaacttgatgcaaatcaccttctgggaggcagatttgacctttgaaaaatagaaagatgattgaatgtgaagtctggtccctaaggtaggttaacaaattgggtaaggctaattttctttaaaaaagaggtaagtgcctgtctgtttcttccatggctcacaactaggatgcttgactaatttagattgattaggtgttcaatcaatagtttagacaaaaaagtcggcttttactctgagtgaactgggaatgaatgaatacatgaattcaacaaatattgattgagtgcctaatatgtgatgggcacacttctagatgttgagcacaaaaatgttctgtacaaaaatctttgcatgttcaatgtttacatcctagagggaaagaggaaaacaggtaaataggataaataaataccataaagagtagattaggagaaaatgtgggaagagaggataggtcacattagagaagtattgcaattttaggcactgtggtcaagaaaggtcacagagagaagagtgagccaggtatttgagtcagggcatgaggaagtgagggaggagccatgcagattctggggaacaagcttttcatgtgaaagcagctggcacatggaagaactcctacaacctgggcagagtgaaagaaggtaagaagagtaggaggcagggagggggatcacgtagggccttatgggtcaatgaaaggactttggtttttaatctgagtaaattaggaaggctttagcttctggaagagttttaataaacaagtgttgtgatcacattgatgttatgttgtgttatgttatatgtagtttatttatttttaaagatgtaggggatacaagtgcagtgtttttttacatggatatataacatcgtggggaagtctgggtttttagtgcactcatcacttaaatagtgaacactgtaccctacaggtaatttttcaactcttacctctcacattttttagtctccggtatctattatttgcttttctaagtccacatatacccattgtttagcttccacttataagtgagaatatgaagtatttgactttctgcttctgattcatttcgcttaggataataggctccagctccatccatgttgctacaaaatacatgatttcattcatttttataactgagtaatattccacatatatatatatcaccttttctttatccacttctctgttggtggacacttagattccatgactttgctattttgaatagtgctacagtaaagtcgataaaaatatatacaggggaaaggacaccctcttcaataaatagtgctggaaaaattagattaccatatgcagaggaatgaaactggaccgatatctcttgccatatacaaaaattaactcaaaatagctaaaatacttcaacgttagatctgaaagaaaccctagaagaaaacctaggaaaaactcttctgctcatttaccttttaaaaggattgctctggctgccatgttgagaatacactagagggaggcaaggggaaaagaagttaggccagttccaaagctactgcaataattctggtagagccgatggtggattcgacgtgtgggaagtatcagtcaggcccccaacaacaaacaggtggtatgcttgaattttgacaattcaaaataggaattttgtctgttttacgaagaagttaactacagagtgtgggtggggaatagaggaatcataagggatagtgtggggataacacaagctgcttatctcttactatgcttgggccaaaagggataagggaggaaaatagttccagaacctgacagcaggagaaagtgtgtagagaagatccccttgagaggcgcagggacacagccatcctgggctgatctcacagagtgagccagtatggtagacaccatgacatcaccttcttccttccacctcatcttctgtcaaggtcaaggctttccactggctaaacccaactaggagtcagagggaagggaaccactgatattcttacaaggtctgtgtgctggaacggaaagcaggatgcagcatagtgaaaagcacatctggtctactcctctttttctcaggtttttctcttccctttcatctgggtgaaaaggttgtgccttctacccagggactacatgaaaccccatcagatatcacatcactgtagatgttatctatccagtaatcctcctatctaccatttaaatggataaccatcactcacattttcatataaggtggtggtgaactcaaggataaagaaaataaataagacataactactacagtctttgcttctgtacttggtgatgagccaaaattggtaatcactattgcctcctgtaagtcagtacatatttcctttaccattaccaaccttaccatatgccaatgccatatacataatccatgttctttaccaggtagcgtgactaaagacattgtttgtagaagatatgagttcttggtggtcttgtcttttttgggttgccagttttccattggccaaaaacttttggctaaaagagtactaacaggtactccactgaatgcatatgcccttcaaacagtcttcttacccacactgtattagactcaatggtacaagggaccacgtggccagggtgaagtctcagtttccaaatcattgagttattgatcattttttcctggtggaatcattcctgccttggatctcaagacctctaagcacagtgaaccttaggctataaggatgagaaaaaaaaatttttaagtgagttattgatataatagtgagagggatcagtctactacttagttcctggatgtgtacattcaggctaagttttttaaaaaagcaaaatatgttggtcacatatttaaaacaggtatggcatctataatataacacccagtactctaatgtgttgacttaccgctggttttgttattgatctttctcctggtcatcccatacttctgtgacaccaactatttctgactgatgggtcatgtggtgattccatgagtatgaacacaccgcctcattacctttgctgtaaaatgaatctcctggttgggggcaatgttgtacaggatactatggcaatgaataaggaattctgtaattccacaaatgcttgtgcttgcagaagcactgtgggcaggaaagcaaaatcagtatcctgaatatatgtctatgtgagtatagtatatttagaggctgttatctctttccctgatgtagtcaactgccaccagatggctgaccggggttggcaggaaattctacagtcttggattatcagcatttgcctctgttgttggctgcatacagcaatagtagtagccaggtcagccttgatgagagaaaaactatgctattgattcacagcctccatatccactttgtatatggacctaccagcaatctaaatgcagcattccaaatagaaaatagttatcagcaaagaagagcatatcctaccaaatcctagacatctgtagatgattttctacttggggcatgccaggcaagctattcagcaatcctgcctaccacagacaaatcaatcattattgattcttctgcgtcatagacccacatggtatagcagcttataccaaagcctctactactatagaatatcttttgtactctgagtcccattcaaaatttgcagtcttatgggttatcaaataaatggtacagagaaacacacccaaatgtgttatgtattgtttccaaaacccaaagagatctcccaaatttgagtctctttgagatgagtggtgtaagttgcagaaattaaactcactttattttttattttttaataggagaaaaagcatggaaatttatttaatatgtatgcacaggagtcttcagattgaagactcaaacttccagtgggactctcactttagaaggagtagcctggcataacccacactgctgggtccccataagccccagtgtggctggctgttgaacttctgcacagtctctctctcacaatttggaatgcatataccttactaagttatctaaggaacataatatttcatgcttaccaagtccattgtgatccatgaattagactaacattatgttctatggaatttcaagttgattatgttccctattacgatagacatcgttgacttgtctctgagaaaaagactttctttcttaattgtaaagggaagaaaatatttatcaggtcaatagctgcacaccaggtgatagagtttgtgttgactttatgtagtggagattgactattctttaactgtatttatggttaccatgaccttagaattaagtttttggtaatctactgtcattctgcatgagtcaacttttgttattgtagttttcacatgccaaaagggggtaaattaaaaagtatgtaccagaaatgattactcttgtatttctcaagactctaatgggggcatacttattattattttttgagacagagtttccctctgtcacccaggctagagtgcagtggcatgatcttggctcactgcaacctccgtttcccaggttcaagcaattctcatgtctcagcctcccaagtagctgggattacaggtgtgtgccaccatgcccagctatcttttttttttttttttttttttttttttttggatttttagtagagacaaccactatgttggccaggctggtttcgaattcctggccataagtgatctgcctgccttgtcctcccaaagtgctgggattagaggtgtgagccaccatacccagcctaatgggggcatacttctataatttgctcagaaatatggtaaatattttggcctgttattttgcctttattggaaagaaaatccagtggaatttagaatttcaagagtcttagccttatctatatctacccaaatatccctatatcctatctcagggtttcacttctttcccaatattgctcttaccttagcacaggatgcctggttgggctgaatgtttgaaaagcactgcaactctacaaactttaaatcctaaaccatatctgttttctgactacaggagataagcgactcaattccgctgtaaagatcttctgattctccatgtttccttaattttatgcacataatttaaaatttttattttccttgtgtttattttctaggattatagtgacaagaaaggtgacttcacagtccttacaatcgctaacgttgccatgatgatacagtagcacagccacttgatgtcccagtgccttgcttatacttgccctatatcctgtgctgagcggagtagtcatgttgccgctgtgtgcttaagatatctcttgtcccatttctctgtttgatatatttgcaacccaatcatagcatttcactttgagagtcagattcttgagattactttcagtagcaatttctcttattcgtgttctcaatcagggaacaggtaccatattcaaatcaacataatttaaacaaggtttatgtacaaagtgactatttacaaagatgtagttgaagtacagaggaactgtaagggatttgtaatcaactctaggccagagggacagtgagtcagatttcctagaatccagaagaaggaagttgctttaagcaggctgacttgagaggactaggaagcttcaacagagacatgccagtataaaggggactgtggggactgtgtgacgggagcaaggaatataactcctctgaattaactctctccattccctcaatgggagagcttctcatggttgaacttaactgaaagatagtgaggaaggaagtggatttggagatcaccatgaggaagggtggaggacaagtggaagatatctgaatctgtggcagctatagacatgatgataactattcggtttctctctctctctcttttttgtttttttgaaacagggtctcacactgtggcccaggctggagtgaggtggcactgtcatggctcactgtagcctcaacctcccaggctcaggtgatcctcctacctcagcctcccaagtaggttggactacaggcacgtgccatcacacgtggcttatttatttatttatttatttatttatttatttatttatttatttagtagagacaggatttcaccatgtcgcccaggctggactcaagccatccaccttcgtcagcctcccaaagtgctaggattacaggcatgagttaccacgccgagcccagtttctcttaatttgaaggaagagcagatataattggccaataggttaaatacggggtatgaagggaaggatgtagaaacagagaagtcaagaatgactgcaggtttttttgtttctgttgttgtgtttttaatctgaacaactgaaaaggtgtaatggacatttactgaaaatggagaagaatgtgaaaaaggaaagtttgggcggggcaaaatatagatgtttaattttaggatatattaaattctaatgcctatttggcacccagtggagaagtttagtaggatgttggacgtataagcctagagttcttgggagaggtccagacttataaatacttaaagctatgggacttaaagagagcatcaaaaaagtgaatatgatagagaaaaaccctaaatgctgagcccaaacactgcaatagttagagtttaagaagactagtaggaaccgggaaatctgactgaagaaactgtggggtgggagaaaaccaggtgaatttgatgtcctgcaagtcaactgtagaaggtgtttccaaaaaggaaaatatttaaaacatttaatctattttgagttaattttgtatatggtgaaagataggggtccagttttattcttctgtgcatatgtctaacttgctatcccagcaccgcttattgaatagagagtcctttcccccttgcctatttttgttgactttgttgaagatcagatgattgtaagtttgtggctttatttatgggttctctattctgttccattgttctatgtgcctgaatttttcagtaccgtgctgttttggtcactatagccttatagtgtagtttcaagtctggtaatgtgatgcttccggctttgttctttttgcttaggattgctttggttatttgggctctttcttttagttttatataaattttagaagttttcctagttctgtgaaaaatgacgttggtagtttggtagtttgataggaatagttttgcttttatagattgttttgggcagtatggccattttaataatactgattcttccaatctgtgagcaggtaatgtttttccatttgtttgtgtcatctataatttatttcagcaatattttgtagttctccttgtagagatcttgcacctccttgtttagatatattcgcaggtattttttgtggctattgtaaatggattgcattcttgatttggctctcagcttgaactttattggtgtatagaagtgctactgatttttgaatattgactttgtaggatgaaactttgaatcctggaagaaaacttaggaaacacaatattggacatctgccttgagaaataatttatgactaagctttcaaaagcaattgcaacaaaaacaaatgttgacaagtgggacctaatttaactaaagagcttctggacagcaaaagaaaagatcaacagaataaacagacaacatatagaatgggagaaagtattcacaaactacacattcaacaaaggtctaatatccagaatctataaggaaattaaagaattgaacaagcaaggctgggcatcctgactcacgcctgtaatcccagcactttgggaggccaaggtgggtggatcacctgaggtcaggagtttgagaccagcttggccaacatggcaaaaccctgtccctactaaaaaaatacaaaaattagccagccatggtggcacatatctgcagtcccagctactcgggaggctgaggcaggagaatcgcttgaacccaggaggcagaggttgcagtgagatgagatcgtgccactgcaatccagcctgggtgacagagtgagactccatccacaaaaaagaattggctaaacaaaaaacaaataacgccattaaaaaatgggcaaaacatgaacagacacatctcagaaaaagacatagaggcagccaacaaacatatgaaaaaatgttccacatcactaattatcagagaaatgtagatgaaaaccacaatgatatactatctcacatgagtcagaatggttactactaaaaagtcaaaaaataacagatgctggtgaggctgaggagaaaaatgaacacttacatgctgttggtgggaatgtaaattagttcagccattgtggaaagaagtttgaaaatgtttcaaaaaacttaagacagaactaccatttgactcagcaatttcattactgggtatatttccaaaagataataagttgtactacaaaaaagacacatgcactcacaggttcattgtatcactactcacaaaaacaaagacatggaatcaacctaggcgcccatcaaaggtggattggataaataaaatatggtatatatatatacaccatgaaatactatgcagccattaaaaaagaaggaaattggcccggtgtggtgcagtggctcactcctgtaatcccggcaatttgggaggcagaggcaggcatatcacttgatgtcaggagttcaagaccagcctggccaacatggcaaaaccccatctctactaaaaatacaaaaaattagccggctttggtggcatgcgtctgtagtcctggctactcaggagactgaggcaggagaactgcttgaacccggaaggcaggggttgcagtgagccaagattgcaccactgcactccagcctggatgacagagtgcgacgccatcttaaaaataaataaaaattttaaaagtaaaaaaaaaaaaaattgcatgttctcacatataagtgggagctaaacgtgggttacttatggatataaagatggcagcaatagaaactagggaatattaaaagagagaaagggttgaaaaactaactaatgaatactatgctcagtacctggttgatgggatcaattgtaacccaaaccgcagcatcacgcagtatacccaggtaacaaacctgcacatgcagccctgtgaatctaaaactaaagttaaaattatgataaaaaagaaaataatctagtgctgctgactgaattagacaaaaattaactattttgtttatcaaagttgaggtcactaataaccttcacttttagtagggtagtaggaacaaaaacctgaatggagtgggttaaggatagaaatttaaaaatggacggtaggtatatagatacttatttctagaaggttttctgtgagaaggaaggaaaaaatagggtcttttctgggaggtgaaagtagtattaatagacaactttgttttataatgatgaaaggtattaagagtctgaatataccatgatagaaatagatcaaaaagaacaaaggaaccactgatgatacagaagaaagggatgaattgctggagcaatatcctctagtaaatgagaatggaagagttcgccctagatagatacctggcagctcgtagcaccaggagagaagatagattgattatatgggctcatgggcagataggacagtatataatgtgatgacaacttgtgaggtctgatctgattgcttctgtcatctccatgaagcaggagcaaggttatcagctaaccgggaagatggtaggaagtgccagatgtttgcggagaatggagaagggatcacacagtcctcctaagagtgagagattcaatgaaccaagaaaatgcaatgtggttttgggcagcgctgggacaccccataaggttattcatcattgaagtaagaacagtcagcataggcttgtatttttctccagccacatccagttgtgtaggtgcaggcgtgggagtagactgataattggatttaatgaagattgcagtttagccagcaagttggagaactttagagatcaaatgtcaccttgtggttatacttgagtgacaagaaacaaatttgttgagtttctaatactattcccaaaggtaattattaaaccataaacttcaatatgaaatacatcctttaagattaattttaacatatcggacatttaagccatataattaaatttaattaacattttatatgctaatacaattaagaaaccaaaagactatatagtaaggcacattttattatataatgataaaaaaggaaaatttattactttcatttttactttgattctatattagttatactggaatctttagttgtattcctaaattagagaaagattatacttaggaaatggctatctcttctggttttagaccattaggtttgtatgttagtttctatttttaaaatgagaagtcagttcaactttatacaagtagaaatgatgggtggatgtctgtcctccaggggggtttcaggggcatgcaattcttcccttactctaagcaatcatccaggtgcttaaatttcctaccatcattttgtttttagaattgaaacatagcctcatggaagacatttaagatgacacctagaaggacccattggtcccagtcatcattcttgtttggtttgttttattagattaatacgaaagaaagtggagccctgagtgtatggcacacatgtccggtgagtattgatcaaaggtaggaagtcaagaatgagcttgcctctgcagtaggccatgtctaggtccattcccataaccctgagggcatggttacctgggttgcagctctcaaacaaggaaagggttatgtttaaaggacacttgaagataaactgaagatactccccatgtgctttataatatttctaaaacctggctctgagctccagcatcttatctaaaattgttagttttttgaaagataagtttatcttttctatcagaatagctaataatcatataatacttatttttggcttactgtgttttgagcagtgtgttaaggctaatgcctatgttttggtttcttcaagcctaagaaaaaacattgaggttatcgctttatacgtgaggaaactgaagcttagagtattatttatttattttattatttatttatttatagagacagggtcttgctctgtcatccaggctggagagcagaagcatgatcacagctcactgtagcctcaaactcctgagttgaagggatcctcctgcctcagcctcctgagtaactaggactacaggtgcgacaccacacctggctaattttgttttttgtagagaaggggtctcactatattgctgacattggtcttgaactcctggcctcaagtgatccttctggctagaacatttaaataatttattcaaagccctaaagctagtggagagtctagatggaaatttgcaaaagatctacctgcctgcttataataaaaaatccatgagagcaggcatcgtccttgtatctctgtatcctttaaagtgcctgtgccttcggtgcagattgccactgataactgtttattcaattgagtgaacaggactttcctacattggactgtgagttatcccacaaatggaaagtaaattaaacatcaaggtgctttgtacagataatgaacactagcattaactaacacaaaaccaaaaccccattaagttttctttaaattagtctgatagttgaggccaaaatgcattctgacatgaaatagcacggattgcttttagatctctcataatgcacaccttttagttgtatggttcctagtaaacatgcaggtgtatttttgttgttgagatcatttaagttttgcctggtaaatgtcctaatctttgtattctccaaggcatccgtgtgaaacccagggccatcctaagcaatatgagatatctggctacattctgatagctttattttccaccgtaactaattccaatttacttgccaacaacttcagacatcagctggaggggaaaagaggatttaggggtggagatgtattttaaataatatttaataagatttgtttttgtaattggaaaataaagagcatttctctggggatatgcctatgttgcagaagaactggctcaggacacgttttgtaaatggctctcctttctgtggccattcaattcaaaggttttggggtaaaatctatggaaggaaattcacgcaggaaagagggtggagatggaaaaaaaaagttcatgcttaagtcacagtctatggataagaaagaatttgaatattaatgcataaccttgagaattaaatgctctgtccagcaaccttacaagctgacagctggctgggggctgataaggaacactgggtggggggtaggttctgggagggactagttcccagagcaggctctcatccctggctggcattagaaagaattacaaagcatgattcagaatctaattttgtcagctggtgattggctcccacgaggctctggcctcacaatgcgttgtattaagtaatgggaattgggctgtgctcttgttctctgcttcatgcctgccaccctactctccttcacagtgcttcccatgtctcctgcgtatacttaggtgtgcttgcttgcatccgcattccaaaaggcatttctaaataccttcacaatacacagatgctaaccacacagaaggatgccaacaccacattgtttctttgtatttaaatttattttagtcttgggctgcattgaacaaatcaacaacaccttgttaggataggcaaaacccagataagaaaatacacagtttaaattaaacctctccatttgccaacccctatttagtggctcagtgcaagagaagcttgtagcatgggtaaaagagtcagcctccatgcaaaaatatcaaataaacacatggtgtggtgtgagacatcattgggtttctgtctgcttcaaagaaacagcattgaatgaaaatggactctacaacttgtttttcttttgtagccaaatgtctgatacctgtcaaaacgtctgtttatcctttatgatatgacttatatcaccagtgatgaaactcattttaaaggtagtaatttgcacaattacaaaaggtggcgttatgtgttcagaggacatataatacgggttttgttattctcttatgtaactggacaggagttagtttatcaaagagttatgtaacaggatcattttccattcattttaagacttcaagaacttcgttactctctctgggttccagaacatacaaaaattataattaatgggcaaaggtaatatgttcagtggacagaatattttcagtttatgaaacatttctaagaatgtttttttcctcaaaattaaatcacaggattctttccctcattctgaaacaattttcctaaaataaatttgagacccccccaataaaaaattgaacgattttagtttcatgctgtccttttcttatcttcaggctatgcttgtttcagatagaacagccagccccttgttgaagaaaaagggcctttacaggatatcagaagaccttaattctatttttgctctggcatgaactagccatggccatgtaagtcactttctggaccaatttcctcgtttgtaaggttgagggaattgactaggtcagaagacaaacactcttggctggcaagcaacttccagatgtgtttcctatggcaagttgagtttctttaaaatctatatttaaggctgggcgcgatggctcacgcctggaatcccaaagctttgggaagccgaggcgggtggatcactgaggtcaggagtttgagaccaacctgaccaatacggtgaaaccccatccctacgaaaaatacaaaaattagccaggcatggtggtgtatgcctgtagtcacagttacttcgggggctgaggcaggaaaatcacttgaacccaggaggtggaggttgcagcgtgctgagatcatgccactgcaccccagcctgggcaacaagcaagactccgtctcgaaacaaacaaacaaacaaacaaaaactatatttaaattattttaaataggcatgcctttctcagtttgccacagccctcaccactccttattaccttgtttttatgaatgtatgcatgcatttgtgtatcagttggctttttccatgtaacaaataactgcaaaacataatgtcttacatttatacggattaaactaggcttaatggctaaagcacagctatttacttagctcaacattctagggtcagtaatttgatggttttagttaggcaattctgttggtcttgcctggtctcatttactcatcttggatcaactgccatttagtaaggtgtctctgcttgtgggtattgattgcctgtcacctggggtaatagatatttctgagccaaatcattcagcaagctaacttgaacttcatatggcagcttctgtgttgcaagggtgcaggaacacaagttgaaaggcccgttgggtcctaggcttggcactgattcattgtcatttctgttgtattctattattcaaagcaagtgacagggataactcagattcaagcagtggaggaaaatactccatctcttgaagagaaaagctgcaaaatgttttggctatttttacaattgctacaacctgtttgcaagcatttcatcttgcaaactgtggattacatggccttcaatttattcccagtctaaaaacaaggaaaatcacaagcaaaacaaacaaagtggatactcttttctataccagaagcatattcatagtgctcagcaagttgctttaaaatagaatcattttagaacagtactgacaagtacatatcccgttaaaccacaagtccccagatgtttggggatttctgcccttagtgaccaaacatttgtgccacaaactattggcagtttctgaacctgggttatgcccttgtcataatatggagccgctgcttagtgatggccaacactggagatgggaattctcactgagccaatgtaagccttcaagtctgtccctgtatgtccctgaagacgaacgtaatctgaatcccttttgaggtttagagttgtttccagactccctgcattgactttttcccagaatacccttagtttgaaatgatcatttgggggaaatttcttttagactggagagctgactaaccatctttcatgcacagtgtggtatgaaggaaaggctgtcaaattataaaatacaaatataataaaccccattttttaaaacatagacttggcatattataggttcagttgaaacctctatgttacagacctctaacttctattacctctataacccctaaagctatagacatagatttataatgctgaatatatccattagctgagcatgcactaagtccagaattctgctctaggtgctttaatgactggaaatacacatgagaaaatgttcctcctttcaaagtgctttcaggctaccataatcaaagtagtcaatcttgaagttgtgagtcccagtgaaagaatttttcccggaatgacttgagaaccaataataggtgttttcctgtcttaaacattacaactgtatgtaataagtaggaaaatgactcactgcatcactttattttacatctgagatggaagatctgcatatagatcttgaaatactgtttttgtttctttatttctttctttctttgtttatttagtgaaacagtacgacaagacacatggggaaagatacctcagctacagtgtttaattaagaatgccaaatttccagtttgaagtgaagcatgttcattacgcttgtggaaaggagctttgcatctacattttcatcatcacttgcattagcaggaagaaggagagacaattaaaccccttcaaatgtttgagcacatgaagagaccagggaaattgctgatgctctgcaaaagataatttcaggaaaaagaaatttaacagaaaacaaatagacaaaggatatgagaaacaatatacagaaaagtgaatccaaatgaccaacaaatgcttgaaattttttcacactttgtagcagtcaatgcaagcacaataagatattactttatatcctgtacactgtcaacaattaagtaacattatcactgaagataggtattcacacaagtaatctccagaggtgagattcaggaaactgtgttttaacaaactttccagatgattccaatacacacgaaactttgagaaccactgctgtcatataggtctatacattgcttcaggccttttggaaagcaaaatgacaaaacctaatgcatttttaaatgttataaaaggccgggcgcagtggctcatgcctgtaatctcagcactttgggaggccaaggcgggcggatcacaaggtcagaagttcgagagcagcctggctaacatggtgaaaccctgtccttaccaaaatacaaaaattagctgggcatgatgacgggtgctggtaatctcagctactcgggaggctgaggcaggagaatcacttgaacccgggaggcggaggtttcagtgagccaagatcgcaccactgcactccagtctgggcgacagagcgagactctgttaaaaaaaaaaaaagttataaaaataagaattagtatatccaggatttcttattctgaagatttctttcacagaaagaacgaggaaataaataaatatggacaaaagtgtttattctagctttgttacaaaggcgaaaacagatgaaggcaaaacagaattgttgaatgtatctattcaatatcagtagcaaacactatgaattagttgtacactatgaattagttgtacactaggaaagttttcaacaattattttcccatggataatagcaagatatacagaaatctgtcagtatgatctaattttggtaaaacaataataaaaactttaacttcatgatatgtaagcaggagagagagaaaagacaaagaaaacagaaaacagttaagaagactgcctaacataaaaacaaacaaataaataaaagaacaggaaaaacactgagcacaaatgagtgacttgtccacaccatgcagttgttcagtaataaagctggaatgcgatgacaaattctcttattccaaactcatctctattactgtgactccacattatgtcttgtccaaatgctgaaagaggtgttcagttcttatccaatttcatactcatttatagcacctggctcttagtagctactaagtaaacatttgtttaatgtttaaagaatggagagaggaataagcaattcgagtatatttcagaagagcaggtcctccatactgtgttcattttattcactggttaggatatttaccaaaggttcctttctgttgcctcagtccagttcaaacaactgtgcttgacattaaaaaatgctcaaaaaggccaggcttagtggctcacacctataaacccagcactttgtgaggccaaggcaggaggatgacttgaacccaggaccttgagaccagcctaggcaacatagtgagattccatctccctaaaaaaaaaaaaaaaaaaaaaaaaaaattggctgggcatggtgatgcacccctgtgatgccagctacttggaaggctgaggcgcaaggactgcttgagctttagcgtttgagtctgtagtgagttataaacatgccactgtgctccagcctgggaaacagagagaaacctgtctctaaaatacaacaaacgtaaaaataaaaatgctcaaaagctgaggttgatcaatgggtacgtatatacggttagataaaagaaataagacctactatttgatagatcattatggtgactacagttaagaataatctattgtacatgtcaaaacagctagaagaaaatattttgaatgcttctagtgtaacgaaaaaatatttaaggtgagtatatcccgattatcctgatttgatatttgtgtattaaatgaatgcatcaacatattacctgtacccccaaatatgtatatttgttgcatattaacttaagaaggctcaaaagttaacatcagtttttcggcccatgtttattttctctccttttttcacaagttaactccagtccagctatttctggtctcaccgaagcacatttcttaacaacccctccaagcctttcactgagaacttctttcccttcccttctttgctccaccccatctgtctttcaaggcctaggttctttcccatctctcccacaacattttctctgaaccattcttagtcacatttttatatgttcatgttgtactcattcctacattattaagcccctatggtcaggaactataccctaaggtgctttgcccaccccgtaggatcttttccaatcctttgcacatactgggagtttaataaatgtctatgattcaagtttttgttgtatgtcatcaaggatatttgccacttgtcaatggcagccttcacactgcttgttttggtagtatttgaagcccagatgtccagaatggaattaattacagtttctccatgatcctgtttctctttctgtattttctgtcccagttactgacactactattaattcaactgtccaaactgaaaacctcccatatttgatctctggttatttttgcctcctacatttaattggctgctcagtttaattgatttttccactgccacacactgccaattaatgtactacttttcttctcttcccactgccaatgtcctggttcatgtcctcatgctccctgttgctagtgaagtagatttctaactgatacctctctgttcttactctctaatccttccttcaaagggttactggagttaaaaccttgccaagtctcatttttctttccccaagccaataagaattaaaaaataagtgtcattgtgtggcattgtaaaccctctcccattggctccccttctaacatttctgccttatcttttccaaaccctccagacacacagtgttaggagcttggatatatccttgacttttctcatgctattctcccaatttgaagtgcttccccttcctctcctctaaactctctagttcctgtcacataggaaacatgacgatgtattagatatcactgctataattactaaaggctgaattcaaatgcttattttctctgtgaagtttgtctcaatttttcctgtgaatatcaataggtcatttctctattctctgtacttattagtaatttttcattataaaactttaatttttatattgtagtttgctgtttagctctcttcgtcttcctactcaattatgagctctttgagaagagaaaccgtggcaaactcatctgcatattctcacagcatctagcctgtatatggtacatagtaattgtttcttaattatttaatgcatgaaagagtgaatgttttctctcatctacttatgctgaggaattgttatattatactaaatgctttacattgtcccatttattctcctcctttagcaataccaaccaagcatatgtgtgtgtttaatatatgatttattttttatcattcatatttttattagatctatatatgtacacagatgaaaacacttaaaaatggtaaataaagaaaaacaccagtttttcactcctcagtctcactgccattttcaactctttgaatggtttcttctgctttctaaattctgtagttctaaataatatgtgtatgctgaagtttattcatctaacaactgtagacattattacttggtttgaaattatacttggtagattagtatttagctctgttcagcagagcggaccacgagaacaactaacagggatttgactacacagaaccagttgactctcaaaggaatggagcctgacttgccctgtgttagcccctgactctgaaccactcagctaactgacctcttagcttcatcatcatgaccactggcccagaacttgcggttttctatagaatccatcagagcacttcatttttctatcaagctttcaattgatgtctgtattaaaacattggcctaagattaatttctttttttttttttgagatggagtttctctctgttgcccagactggagtgcagtggagtgatctcagctcactgcaacttccgcttcctaggttcaagcgactctcctgcctcagccttccgagtagctgagattacaggcacgtgtcaccacacccagcaaatttttttatttttagtagagacagggtttcttcatgttggccagggtgcttgcatttcttttttttttttatactttaagttttagggtacatgtgcacaacatgcaggtttgttacatatgtatacgtgtgccatgttgctgtgctgcacacattaactcgtcatttaacattaggtatatctcctaatgctatccctcccctctcctcccaccccacaacaggccctggtgtgtgatgttccccttcctgtgtccaagtgttctcattgttcaattcccacctatgagtgagaacatgcagtgtttggttttttgtccttgagatagtttgctgagaatgatggtttccagcttcatccatgtccctacaaaggacatgaactcatcattttttatggctgcatagaattctatggtgtatatgtgccacattttcttaatccagtctatcattgttggacatttgggttggttccatgtctttgctattgtgaatagtgccgcaataaacatacgtgtgcatgtgtctttatagcagcatgatttgtaatcctttgggtatatacccagtaatgggatggctgggtcaaatggtatttctagttctagatccctgaggaatcgccacactgtcttccacaatggttgaactagtttacagtcccaccaacagtgtaaaagtgttcctatttctccacatcctctccaggacctgttgtttcctgactttttaatgatcgccattctaactggtgtgagatggtatctcattgtggttttgatttgcatttctctgatggtcagtgatgatgagcattttttcatgtgtcttttggctgcataaatgtcttcttttgagaagtgtctgttcatatctttcaccaacttgttgatggggttgtttgtttttttcttgtaaatttgtttgagttcattgtagattctggatattagccccttgtcagatgagtagattgcaaaaattttctcccattctgtaggttgcctattcactctgatggtagtttcttttgccgtgcagaagctctttagtttcattagatcccatttgtcaattttggcttttgttgccattgcttttggtgttttagacatgaagtccttgcccatgcctatgtcctgaatgatattacctaggttttcttctagggtttttatggttttagctctaacatttaagtctttaatccatcttgaattaatttttgtataaggtgtaaggaagggatccagtttcagctttccacatatgccttcttaaatgcaataattagcattaaaaccttgcaaacactataatagtcactatgtaactccatgcattcactggtatggagttttggaaaattccagtgttgttcttagttcaaacatacatggaaatacaaaaaaaactgttgacataaagtctgtagagcacagttcttcttttgaaatttctcggcaaagcatttcagcaatataattatcaggcacaattaaacagaaactccacaacaatgtagtacatcttcaagagaaggcttgtgaaggttagtttatactcatctttcatcattgaggtacatcttcatgcctcaaggagaaatggtgtcaaacataacctgtgtttgtcctagacatgttaatttagccagaagaggtcaatcaaaggctaaaagatgtccaaaaagatttctcctatatgttggccaaggatgcatgacaaagatagagataagatagagaaagcaacagcatgcttagtctaatcctagatagtctgtgcttaagcaaaaccaaacaagttttaattgttaacacacagagccaggtaatgcttcatatcaccatgtgaacagattattaacagtggggttgtcatcagcagcatcattgttgtgtctgagccatgtatgtgaagcctgtgtgtgactcagagtgatatcatcagtgtgggccagggggtactggcaaggacaaaggctgagtccagtaggggatctgccaaagaaagttggcttttgagtcaacatgaatctcttcaggatctgaactgggaaaagcccggagtgtctccatggccaaagccaaacaaatcaatttttgaaggccctgaggtctttattaaataagggaacttggtatacaaattttgaaaggggggaaaaaagcaatgaaataaaatagtactccacctttcaacatattttcagaagtacattgttcagtgaagcagtttctgggcttctccactaggtatggtttcagagtgtgatttttaaaatctggcatgtctttgtctattactctctttgtgggctgttgaactgaatagaggcagacattactcagaatgaggatggagactgtctgttttcgagtaacaaaactttattttaaatgtctactttgcccccaatttttttttgtaatgatgcagtaaaaaattataggatgcttatcagcagactataatgtattacagatccaaagagagattcagatccctcaaacacctcttaaaaagatgggccagaaggtgccttacaaaagaatgggatgtaaaccatgaacttacttttcagatgcccaaaactgccatgaaaagttcatttctttcaaaattagtgcttttaaatgactcaaaatcattattatttcattcaaaaaatcacatacttaaaaagcactgtattttcacacttattttcagtttattgtatacagacaagagctcatgactggccaatttatcattaatatctttatttttcatagtacatatttttacagaatgacattcctgcatttagccagaacaaaacaattcagttaattttgaatattactcatgcttacatggaaaaggatgaaaatattctactggaaaacaagagacaattcatcttacttgcacctggaatcttctgtgaatcacagaaaaatattaacttgactcatatataaggatttcctctctattaaataaaacatgacttatctctataccttttcagtcttgttagagagtaagagagtttattttttcccaatgtcttccctaaatgaagttttaaaaatgtattctaatgtccagcatgacgtaatattaagtattgagtcataaatcaagacaccagcgttagagtttcaacttggccatggatttgtttgtggttttaggtctaatcacgtaatttttataggcatcagtgttttcaccttgaagaatctgcagaggactgaatacgaatgtgtcttaggctcctcttggcatgagcaccaggtcaaagcctttggtgacacttagtatgatttttaccttggccatcaggagtttgtcctggacctacctcagaaaggtattatgtaaggaatattgcattcttcttcctcagagtcaaactgttttcaaattcacttgtagctgggaatgaagagctcaccccataagggcatatgttttctatttggaaaacagatctgtggaggccattctaatcagtctcatgtaccttcctttgaacttgaaggctctgtaaacaaaacaatacctccaaactattccaaacaccagcatgagctgccatccttgataagttagtgtgtgaatctccctttcctttttgcttttattggaagtgacatagagtatttctgcattaaattaaatctggcccacatagagctcttttacatggaaaatgcgagaacatgggttgttggcagaagtaaggtaaatatagaacctctgatggcgtttgggtgctatgaagcttattcatcgccacagaccagcaatgacaacattgttcacaagtggtaaggttgcaataaagtagtgcaagtcttccaaaagatgtggtattaaaattcatgctaattactctcctgtcatttttctacatgcccacatatctatctaattgtgctaactttgatggactatttcacttcttttcatacctcttttggttactattgaaagaactggcttatgagtctgggtggagaaagagatgatgacaatcttgagtttgaaatgtattctggagtcaaaaaaagggatttgaatgaattctgagctcagctgagtatagtcagtagtttaagtgaaactgtactaacataaatcttgtgaattagcagaacatgaagacaagttagcattttgtggggctgcagacttattgcctctggcagtgaaaatatgactagttgcattttgttcagaacttagtaaactatataatgacattacaagttgaaaaataacttgattttgaatttacagttttgaatccatatgagctgtcttcaaaactgcttaccttacatttccctcacactgacatgtgatattaatccaataaggaattaatggggaactactaagtgctaggcactttgctagaggttggggatatacatatagctcaaaatcgactggaattctaggcactctagagttgagacattacttattataataattgtaatttgacttctgaggttcttcgtgggggacattctaatgacttcactatgacattcatggagagaactctgaggtcttggcatacataggtccatctcacacttcgagaatttggtgaagttccctgaaatgatctaggaacccagtattgacatttgctattcagtctagcattcagttcttttcatgaggcttaagggtcatggtttcaaagtcttttcacctatgagtaagaaagagtcgatttggagaaaacagagcaagcaaattttcctgcttatgatcatgcagatgtttctggaacataaaggggaagagccaggtggaatcactcaaaatttgcagttcatagaagggtttttcttctgtttgtgagtgatgaggagatgaagctgagttttatggaaaactgggaaaaattcttataaaccaaataattcatttacaaacacattttctattatttcttgtgctggttttagtaaatgtatacctctggatatacattcattttatctcaattgtaatatattgacacaaagttgattatatactctttcttttttaatgtcagtaggatctttagtggtgtcctccttgtcattacagaaattatctgcattctctctctctctctctctctctctctcaccagtcttgccagggggttattctattattattattatttttttttgagatagagtcttgttctgttgcccaggctggtgtgcagtggtgcaatctcggctcactgcaacctctgactctggggttcaagtgattctcctgcctcaggcttccaaaaagcttggattacaggcgcccaccaccacacccaactaatttttgtatttttagtagagatggggtttcaccatgttggccaggctggtcatgacctctattgctctttttgaagagctgcgatttgactttatagttccatttattttattaaattttgtttttatatttattattttcatttttctattttctttggattcactgtgctgttctttttctaatttcttgatatagaccttagattactgactttcagccattcttttctaatgtgtggatttatgactataaatttccctttgagcgagattttagtgaagctccgtaagtctgataagtagtattttcattataattcagtttaaaatgttatttaattttcattgtttcttctttgaacaatgggctgcttagagatgtactgcttaattttaaaatagattttctaggttcttttttgttgcgacttctactgtggttacagtataacatttgtattatttcaattccttgaaatttggtaagattttcaacataacccaacatatgttcattctggaaatgttctgtaaaaattttttaaagatgtgatttctgtggtttaatacaatgaagttaggcttgctcataattttgtgtatgtctgctctctactttctcattttttggtctgcttgctaactaagttttcatcatgaacttttgccatttgtaccaaattctacctacatctattgaaatgctgtattattttattctttattttattaatgtgttaaagtatataaattaattattttattttattttatttattttaaagcctgtagcccagtctggagtgcagtggtgcaatcatggttcattgcagcctcaatctcctgggttcaagccatcctcccaccttggccttccaaagtgctgggattatgggtgtaacatatgtgtcctatatgttgatttctcaaatgttaaatgaaacttttcattgttattcatgatgagttgtctgtttttatgtatctctggatttgtttgctagtaacttctgcctcttggttttgtggtttgatgacttttatcattttgcaaaatccctagatatcagactatctttcaaatattttttcctgtcacattctctcttttccttttggagttttaattaaggtatgttagaacctttcagtatctccaatatgatttttatattattttctgtactttacataatttttttaaaatttcaatacatatatttcttcctgatctgtttttcatttcatcaattttctcttcagctttttataatgttattaaagtcattcactgagatattaatatctgttactgtatttttagcttgataatgttcatttaatttttaaaaataagtttctattttattccaaaattcttcttctcatctctgtttaaaatttcttgcgcatattactcagcattatttttatgcttgagatcttcatattcaggatatcctgtgtatctgtttttattatatttcctcttgttttttggtcatttgttttggccatcttatttttagtattctatttattttttgtggaatgctagacaattgtgtttgataatttctggagacattttgaagcctcagttgatgtttatctttcttcagagaggatttatcattgttttcggtaggcagctaaactagttactaacaatcccatatcatcttaattaaattgggggttgaagtgatttgaatctgggtccagtctctctgaggtctgggctacttccaattcaactttttttcttaggtgtggtcttaaaggtaccaaccaaaagactagggtgtttaccaaagatcctccttcacatacaacatactctaatttttgtccttctagcagtatgaatctagcaaaatctgtaatccgcttctcatactcttggtttccacattcaaaatgggcaaaagccctggaagaaaagtggaaaccaaatgccgggatcattttttttttaaatttcctttttaaaaaattattattctacaaatcctcactgccttgatggcactccaatgtctttaaatagatttaaaattattttcggcagctcttcttgttgttttcaagggggtaggaaaaggccaggactacttaatccaccttttttcctggagctaaacccaaaactaaaaatttgattcaatgtaattttttacccatggtcttctctattttagaaaatgtcttcaatttctcaagtctaaaatataggaatcatccttgatttgtcactttctcatacatctcacatccaactcatatctatgtcctgtgagttctacttccaaaatgttttttgaaaatttctgtcctcattgctaccaccaactctgagccacctttctttctcttctgtttcatagaaataaccttcacactgatgttgttaccgccattcattcttcaaagcaagagctatcttctagtaaacaaactccttctttttaatgtaaataactttatggtgggttgaatttagataaaatacacctcttggcatggctgccaatgccctacttatagtccaacctcatctcgaaaacatttgctccttttaagctacatgtcagctacaatggccttttctgttttcttaaacacaatttctttataaatattttttctttacaatttattaaatatacaaaattattcctcccctttccccacccataagctatcacagggtctgtatacaagctataccacttttcattcttttctgtgagttgagtcctttaaatctttcaggtattcacttaaataccacaatagtgaggtctcccacaatgtgagataccgatattataccctagaattgtaaaagaaaggcaaataaaagtgaagaagtgagtagttatggaatgctttctggggacatgaattgggacaaaactgcacaagcacagggctgatgccaggctttgggaggggacggaccagcactaagcacggtggaaaacatgcttgggaggtagaatccattcatattatgaagaaacttgggaggcaggcgaaagagtttaaaattgctatagagtcaaagtaaaaagggaaaagaggaaggatgagatgaggaaagcaggggttaaagaaaattaagctgacagtagtgtgtggggtagtctagagggcaggaggaatgctgagatcagtgaggtcagccgggaggctgctctgtaatccaggtgtgaggtgatgaagcactagatgggggttggtgggcgggtgacggggagcagtcaggatggagaggggatggatttcaaagggcagtttggcagaacttgatgactgacggggtataagagatcaagaggacaaatatgtcaaagatggatccaagattttgtgcctgggagactgggaggtggaaaaatgagaaggagagagaatgaatttgttgtatttacatgttgattttgaggtaacaacaaattatacaacagcagaatgcccctggaagaagtggaaaatgaggaagttttgtcttcaaagaagaggataaacttagaagtgtggtgatagacaccagggtcccagaagctaagagatgtcttttggagtatgccactttccctcaaagagtcagcagccagacagaatgaaaccacaatgtctggccttagaatgtggacccagcaatctcacggtgctcatctgtttcttgacttcctttttctgtgagaagatagcaaggactttgctgaccatgagagagataagcggaggtcattgtttggaatccttttgctatgattttctaacatattgggcttataaaaccctaagtgtgtttttgccccaagtacttttcttattttttaaacccatatgtattttgaagtcaatttaatccatatgtttctgattaatttatgcttagctcatcaaaatgttgttttaagaagaaggcttattaaaaaaacagagtcatgcttcaccagccactgatgaaatcaactccagaagactgtgccttagtcacaaaatcagatgggctaagggtacaaggggacaatgggttccaaagttgggaaactcactgttgtgatcttaggaagactatgttcaaatacttgggcaggtggggagggggagcttagattttggagtctggagtgtatttagttttcatttctggatgtatttatttgttccttgtattaactatgatccctatacttagttgttcagaaagcttccaggttgttcataaaactattaataagtaggaggaagctgggatatggtataaaatgaggagtctatttctatatgtgattgtgtttttgtcagttgaaaggcatctctgtagaatggttcatgggaattttaagagacaatgtatatattttacctacttgggccataaagatggaattatggtgtatggatcataaagatagaattatgatgtatgtctctgtcactatattgagaattggaaacaaaatggttttcaaaataattcattgtttgagataacctgtatcttagaaaaatcctaaaaggtaataaatatgggggctttattccagagttgaaatttagataacttttttttcttaatatcagaacagtttcatggaagtcttaaacaagtttcaataaaattaaattttgtctactttatttgaatgttccttcaacatcactcactaatagattaaaatcagcaaccctacctctctgatctatagatataattttgtctgctttctccctcaatgttggtttcagccttatttttctgttctttttatttctcacatactctttgagtgatcttagccactccaagtttcgatggccatccatgaactaatgacatctaaattatattcagactttagtcttctctcttatgttctagacttgtgtatccaaatgcttctagttaaaagtccagtggaataaaaaaggtgaacacgccccaaacaaaactgaacttcatttctcaaattcctctttctcttcccctgccttgtcctataatccctgttgtgattcctggtatcatcatccaccttgtaacccaaacagaatacacgggtgtcagcaaagagtcttctttctatttcactgccaacgttgaatcggcacaaatgtttccactctgccccttaaacaatttttgtattttttctcttgtcttcatttccaccaccaccaccaagagtcaagagtctccagctagtatgatttttttttctagtcttgactatctccattaaaatctcactgctgccactgccactattctaagacacaaatatggtcattttgctcagctgcttaaaaccttgagtattccctatgttctacatgataacatccaaaccattgtgtattgtgtctaacatgctacattatttccccccatttatatcttaaagcttatttccttccactttcaccctctcacactaaattccaccaccctggagttcaaggtcaagttcttctaactcgcatctttttagagctcatgctcttacatataatattccttttgcctggaatgttcatcttgtactctctttgtatgtatcactcctgtttttcttttgggcctgggtttaaataaaacttcttccaaaaagccttctcttatttcttttttatctactattattattattattattattattattattattattattttggagagggcatcttgctctgtctcctaggctggagtgcagtggtgtgatctcagctcactgcaacctcctcctcccaggttcaaccaattctcctgcctcaacctcctgagtagctgggactacttgtgcatgctgccacatccggctaattttttgtatttcagtagagatgggatttcactgtgttgcccaggctggtctcaaactcctgagctcaggcaatctgtccacctcagccccccaaagtgctaggattacaggtgtgaaccactgcgcctggcccttctcttacttcttatccacatactctgcagaagcctctgctattttcctgtcataatattcagaatacttgattttatttaaattgcatgtttagttacacacccatgccaaaagaatgtaaactctttgaaggcaagtttcgtgttattcttacttaccaccaaacccgcaactcagcacagtcaatacctggcacatagtaagtgttcattaatatttgtttaacaaagtagtgaaaagcttttttcatatctctatacttccacatacattatttcctccatcttgaatccctttcttgtcctatttgatcagtgaatctctagttttgctgtgataatttatatctcacagaactaatttctacaatataatactctgagaaatgccagtctagcccaactctctcctttgacacaacagaaaactgaaggcaagagaaataggtatttattgaaggtgagacagctggttataatggagaaccagaatgcaagtacattccctaatatgtcataattttttaaataattataatttaaacaatctaaccaatttacacttggttttatttgtaaaaaaaaagacttgtcatttttgtgacagcaaattcatcttcgattactttttactaacaaggacatattttgttagtccacttttgattcatccaataacaaaaggaaacttgataatcaggaatgagtattcgtatgccattgataatgggagaatgagaacattaacaaaaggatgaagtgagttgcacggtctgagtacatttttccacagtaataaaatgatcagtgctgcacatcatcagaatttggtctttccttgggaatttggtgtttattttaaccaacacttaaaaaaaatatgttgctcctccctaaagatgtaaaatttcaccatttattaagtcctcttggctgagttgagaattgtagcatccacattctcacatgtaaaatatttcctaatcacagcaaacgtttgacatctgctctggataactggcccaaaaccaagaaatggaagcattcttagaggatatttgttgatccccagccagtcttcttgacgctggagaagagctacagtgagagggactacttcccccattgtcttctccccaggtgtttcttctttggttacttgatgacacccctctacacagaaagcacacctctctatgctaatattcaggaaccgtgccagagttcaagttgtgttttcagttctgtctaccctttccacacccattggaaagccaagaacagatttgtgtgacttccaattacttcttggctatcctagtcttactttcaccacatggaaattcttcacccattataatcaaacttaactccaacacttaataaacactcaagtggtgatttacaaagattctgctaatactcattttctcgttctgttcttatttattggaattattttctattgtagtctccacttcatagtctcattctgttgtgtttttggctaacctatcagagtaaatgagaagagactcttgtctgtctctggagtgaagggaaatggagttgtcccaaagattattcatattggaaatgattttcattttgctttcattatgatccaattttttcaatttattggaagctaaagttcagctagtgataaatctcttagcttgtgggtcattttcattactatcacctggtttccaggcataactttaagtgacaaagtgataacattgacaataaattcttagaggtgtgatgcactggcacagaagggaagattttaaaacagcacttatttggtggcaagtgtcagaaaatctaacatagactccctggaaacctaactcagaattaagccaaaaagaagaagccggctgggcatggtgacttacacctgtaatcccagcactttgggaggccgaggtgggtggatcacctgaggtcaggagtttgagaccagcctggccaacacggtgcaaccctgtctctactaaaaatacaaaaattagccgggcatggtggcaggcacctgtaatcccagctacccaggaggttgaggcaggagaattgcttgaacccaggaggcagatgttgcagtgagccgagattacgccattgcacctagcctgcatgacaagagtgaaaaactccatcaagaagaagaagaagaagaagaagaagaagaagaagaagaagaagaagaacaagaacaagaagaacaagaacaagaagaagaagaacaagaagaagaagaagaacaagaagaagaagaggaagaagaagaacagccatgatgtagaacttaaaagatctgaggtattttggtttcaggcatggttggatctagactgacatgatgccattagtactaggtctcccactatcacctctgccctctttttttgttgttgttgttgttgtttatcgagatggagtcttgctctgtcgcccaggctggagtgcagtggtgtgatctctgttcactgcaacctccgcctcctgggctcaagcgattctcctgcccaggcttctgagtggctgggattacaggcatctgccaccatgcttggctaattttgtatttttatttatttatttatttatctattttttagcagagacgaggcttcgccatgttggccaggctggtcttgaactcctgacctcaggtgatccacctgcctcggcctcccaaagtgttgggatcacaggcgtgagccaccacacccagcctcacctctgctttcttttgtgttggtgtcattctcgcacacactctccctccactgtggcaaaatgacttccagcatacctccacgcatacatctcatcccttcagtaatcttagtagaagaaagagtgcttcttagaggtttttgcagcaagagtagtgaaactaactgattaaactgacttgagtcacatgttttccctgaaccaataataatagctatgtgtggaagatgctaactggtcagacataggtcatctgccaacttcaagactcttggaataagaatagggttgagataggattaccagaatcctgttaccataagaaaggagaaaatacattggcagaagaaggtaactcatgcccgttaaagtcttataactgactctactgagacataggcccaaataaaaaaaatgaacaaatcctgtgtgaagaaaagcagcaataaaaatatctttggggaaagactcaaagtctgtttatgtgactgttgtcattgaacacaaacctgatagcttaacaatgagaccatggcagccccagaaacccttgatagggcctacttaccagaagctaatcattgtttgaaactgagatgactgtgttcacaggtggtttattgtagagttgagtcatgtctgtgcacagagatagagtttggcatcacctgtgatgaccaagcataataatgacctattatctgttttgaaataaaaccacctttatttcctttacttatttttagttgtgcaaaagtcatacctggggatttccaaggggatatggtgagagccaagtgactattattgtgtttcctgagacaatgtggaagtaagacccatttgcctgcctttgcccatcaggaaattgcatccttcttccacctgataagggaagaaaaagttggggggtggtgagcacaccttctagtagcgagataccttgggagagattgagactaatcacagattgtgttttgcctcctttcatcctctagactttgtgtaagtgcataatttggataaaatgaactgaaagtaaatcagtggtaggttccataagggcattatccagcctgagtgtggaaatatgtttggaagtcatgctggttggatctacagtggctatgcagctctgcattgaagtatggaactgatggcccgtctgtgggtcttgagaatttcagccacacttggaaaggcagcctttcctctactgctttgttcttttccagaccccttgctcctggagctttgggctgttttttttgtttgtttgttttgttttttgttttttcccatctctgttcccaaaacggcagctggaaggtgtttcactttttgaaaaacaactatgtaggacatgagtaaattcatttttggtcacgatattaaagtctactatggaagaatggtccctaaatactcgccaggctgtcaagggaccaggagaagcatgaacccacatgtgttgacacagaacctgtcattatcatgggaaactctcattgcaggaaggaactctccctataggcagcactttaccaacagaagctgcataaaagatgatggtgctgcttcattcactgtcactagtgacaccccttgaaccttcgaagaggtagaacaaaaccaggaatggcttgagaatcgtggaattgtcccctaaataatatcgagggcttggttcaatagatgaacacatggaaatgaatctcatgctgttggcagtatcctcagatggaatgagggacctctgggcctatttccttaacataatctcccctgtttcctcctctttcctttggttgggtccaggcttgtccctaactgcttcctttgttctatttcttcactcccatctttcctcagccctttgtgtctggaacaagctcccttttgcagtctgccaagccagcaggctctttgctgacctgtcctcagtatgttagctttgaagacattcgactcaatcttttcactaaggtcaggggtttggaaggaggagggaggtttgtaacaaccttcaaatgaagaaaaataaaaataattccttctgaagctttggagatcctcagatccttacctccacactatttactctgttctttcagtgagtagtttcttccccccacaaaaaagcaaggttatcattttctacataacaaataatgacaatacatatagcaacaataataatttctataacagtttccaattaatttcacatccttatttcctttaattctcaaatgataattctgattttatagttaggacaacaaattcagaagttacatgttttgccaaagacacacagctggaaaatggtctttccacatataacaaacgcttcctattactagcaataagcgggaggataagtaatgaaagggtgatgtcttgaaataaagaaagaaagctgacaagtttgcatgagttagaatctagagaaaatatgtttaaaaagattcttatttttatcttttaaccgtgtatcagaatgtgagtccccagagtcgtggcccaccagctcacacctgtaattccagcagtttggggaggccgaggctggcagatcacctgaggtcaggagctcaagaccagtgtggccaatatggtgaaaccttgtctctactaaaaatacaaaaattcgccgggtgtggtggcagatgcctgtaatcgcctctacttgggaggctgaggtacaagaattgcttgaacccaggggacagaggttgtagtgagccaagatcatgccactgcagtccagcctgggtgacagagtgaaattgtgtcccaaacaggcaaacagacaaaaacaaaccatttatatttaatattctctacctggattctgagtggagatgatgactcacatatgccctgcagaacagcaccctcctgctatgccattcatcctgctttcagaagctcctagttttatttaaggttctcccatccatgtgccaactacccaactcattctggcttatttaaagtgaaaatattgattcctaattgagtcagcagatagcaaaaattgcttacgtatatactttccacgtgggggatcaggcctgtctttcggtgtttgctcattttgtcattcaattctatggctgataactaaggaatttatttctgttttctttctatattggtcttcattgcaggaaatggtattcaataacactgtgagggctttcttaacatgcaactggaactttgttttcttttcttgtgcagtgcacaagtaatttcttcttaactttaaaaaagtaaacatttaatttcattccccaccctactcccaactttccctatctaaacatacagggagaaatgtgagtcaggatatgtagaaggaatattttacatgtgttatttgaaattcacagactagaggaaaagaatcaccaaaactttgcaaaattctctgtgttttctcccaggtgtaaagcatcgtgggtttgccccataattggagacaagattatcaagtaatattgagggcttggttcaatagatgaacacatggaaatgaatctcatgctgttggcagtgtttatgtatctgcaggaaacccgaggcacagtcccactagaactgaaataattaaatcttttgcttatgttatttcacagctttttcaagattttgccaagaatgaaaactgagacaactattggtagatgaaaattgtgacttgaggggacctggaggtagatgtgttttaagggtaaagagacaaattttgtaatgtgatttgactggatgtaaaaggcagggtgcctacacctcagagcgaagtgggcaaagatcaggaatagatgattgtctgcttctcgtcatgctgcacaaaatttaagagccatttacaaaatggaacaaatgaaaacataagctaaacatcaagtggtaaggaaagatttcatggtgcagaaattattgctaatgattttaaatatgtagtagcaacatgatggtttaactcatttaattctggtcttgacaacaagcaatgaaggatgaggaataacctaaggaacattattcctttggtagtaggtttctaatgagtgaagatttatgtggttctgtgttgtgtacactcaagcgtttggaaaacaaagcaaaaaagttccactaattcagacgcttggagaatgagctaacttttgggaaaccaatattatgggaacagagacaccccttgaacttttgaagaggtagaacaaaaccaggaatggcttgagaatcatcatggagttgtcccctaaaaagattctctttacctacacataagccagttgggcatgggagggaatgaagaaggtgggcattcctttgtgtgtcagagaagcatgttaactcagaaagaaaaggaaaaaaagagagagagagagaaaggaaaagaaagaggaggcaagaaaaattaaagcaacaggatgtaattattttatattttaatgtctgtatcatcaccttcagaactcttattttgattttgatttggttggttccttttcacttagaactgcaactctctagatagtagcaggtgtgggaaacaaagagtactgggaaaatacccctacaagcttccttgaaaattatgcgaccttgtttaactaactaaataaataaatgtatgtcaacttctaagggaaagatccatgggattcattccagcattctttgacaatgctcaattttcccagagaaaaatagaaactctcattacagaaactttatacctgggcttcatttctcatattctcagaggaaagttttcacctctaccatcaatgtggcatcctgtaactggcagccttatctttgtctttttactaatatgaaagccacaccacagttggctttcacagtatttgctaagctggtaacagtgccaatgaggacccagagtgggaaatttacctatgttttctcccctcaacagctgcaagtgagatctgaagtaaggggctggataaaatattcttaggacattttggtaattatgatttaatccaaaggtacagttagacatctttgaaaggaattgtgagcatgtttctttgaattgctgaggaacaccagggttctgacaaacacatcgttttaaggagacccaaaatttcttcagtatttatcatctttctgagatacggttcccacgaatgctcctgaaccttctgggaaggcacatagcttcatatttcccttcacataatgatttctttgtctttttcaatttgaccttgatgttttcctgtaatcctaaagatgcccacttattatagatgataatgtatctatttcctttatgggcaaatgctgtcattcaatgtggagaaaatcatgtttgacattccatgtaagtcctgtgaagtgtctgggaaatttccaagtctatacagtctaagcagtggtggggaaagaggtaaagagtgtgggccattaagtcagattgactggttcaaatcctgtacggcttcactattatgcaactatggataagtcctttaatctttctgtgcctcaattttctatctacaaaataaaatactagcatcttcctggaaaaattgttgtgaggcttaattgtgcagccttgctatgtatatgaaccccagctgtggaagcccagaaatatgcatggagtatctaggatatttcgaggacaaagtcagggaaaccctccttagacatttccctggcacatgtcttttattgttccaatgcttccagttccacactggcctcctaattaaagccgggtggtactgctgatcattcatggacatcagtcatcaattgacctagagctcacaagtagctggtaaaggtttcactgttgttatacatgccatccttattgatggacagaaagttttagcaatttcaaatgtctggattctgtttcaccacttacttaaaattagatccagagtgatgaagcaaagattcaccagatgctgcaattgtacctaattcttttcgtttaaaaagcatggaatattagcattctaatgacagaacattcatctttttctagaatataccagaggcacatctcttaagtatactctacctgcaccagtaattgtaaacagtgaaagcttttaagcaagcatatgtcaaaatggccatttgtcatctttgcaacaatgaccatgctaactttaaatctcttttaaaactttgttcactactccttctttccattagcctattaactagggcactttagcccatgaatcatatcacttatttttggaactggaagggagaaagtcatattatttaaaatatgatttatattaaggaatgtaaaaataatttctgtccaaaaataatttaaatagcacttgccaatactctagattcagaagaccatcaagtttttttgcaaatatttataaccccatataatctattaccatctatcaggtacattttctaacttatatgttctgaaatccccaaatcctgaaatgttagaagtaaacttgggaatcatttagttctaccacccatttaatgatgaaatttcaaatcagatacttttttagttgactgattgacaagctttctactcttttttaaaaataatgtttctttacaagctcctttaaattatctttacccacattcactaaaagcagtaatgaagtcaagggtcactgttctgggcagatgcctgtggatatcagattcctaggaagaccaagtttaggaatttagctttggaggtctaaattccttggaagcaaccacattcatgtccagtttctttagacccatgagctcaaacaaaaaccttcttctgaggcattacccttttgtttgtagtcatcattagtactcttgttatagcaggtcatttttcttgctgccttttctgctagttttactttttttgaaatacataaaattgtttgggatataaaatcccccctctcctcagccttgtgatttggactattctctatcacatactgaaccttttcgtattctttggaagcctgatggcttgctctagaattcagcaaattgggcagagtggatctttcaaaggcaagtgagcattgtgagtatcaccttttcaaggtgaagagtgtcctcttattcagagagcactgaccctgagaagtcacttactgtttctgctaaagcagaccttgagctcaggtgttctttagatgtgactctgaagctgagtttctccatttcctaagcctgattttggacaaactgttggacctttttcactctttgctttgcccctctgtgcaatgggaaccaggatgccgagttcagtggttgccatgagagtccactgaagcaatgcgaaatattcagtgcagtgtctggtgcctagtaggcattctacagccttgatgcctttggggcaggcttactttagaagttttaagaaatctcaaaatgagttctatgatgtttgccgtgcttggacacaaaatgagaaacagaaaatctgccttctcaccctatgggtggagtgttgctcctctatattttaattctttttaataagaaaagggcgtcttgaatgtggtgggaaagggcagaccacatggtgggaagtcatgtaacacaagatacactttattgcatggcgtgtttctgtaccacagatgtgcacacagatgtgatcatcaacagagataactagtttacaagccctccctggaaactcctcatcgtttttagtagaaaagtgattttcagccaaggcctgagctgaagctcagcccatgattaaagcatttccaactgttccacactgaaaagaaagaaaagagaaatgaccagcagtggttttccagccaaggtgtgagaccagaggtcacctaaaaggcttaagtctattaaaacaagtatctgctgtggccttttctttctgcctttccctccttccttccctccctctttttcctaccttcatccctactttcttctttcatttatttctttatcatacattttttttctcctgctctcttcttcttctttctcctctctccttcccctttattcttcatagaaaaatatcaccttatgtcaaggaaacactgagcaacatctactcatcgttgagcctgttaatgtggagagggcatatttgtttactttctaagttgtgtaactttattattattatttttattggtgatatgtgatggaagttttatgcaaatgtctaaagcagcagtttagtataataaatacaatctttttaggattcaaggaaaaacctgagttcaaccctggttcataattctcaactatgcagtattctcaaatacagtagctctgcggactaaataaaataaatgtatgaatacaaggtatctctataatacatatggaactacagcttaagtctcattctctataatagaagtagggcctgagaaacagattcaggtgcatgtcattttgggtggtaaacatctcaggaggaaggggagtgaaggaagcagatggagcaggtggaggagctgagcttaggatgtggtctcttctggagtctggatttaccctaatcccacagagagctctggagtgtgaattacacacatgaagtttgttcctaccttgatgtggttggctggtcttttgtattcttcatgtccattagcccttgcaggtgggctgcccctgggctgggggtggcgaggtaacctcccaggcaaatgtccaagaggaaatctctggagaagggggcagttatgagccattagcagcctccgcttgcagcacctggggcagaggtaccagtctggtaaagggcgttggttgtgatatcagcagcatccactatggggctcaataaatggtagctaaacttagtataattcttggctgccatatgtctagttcaagtcctttgctgtggagggtcaatatacacctatcatagtagtttatggccttctcaaaaataggaaaagcaggttagcttttaacaaaataactatactattctctataggtaggcttctccatccaccgacactgaatttggtcagttcccttcaatgattcactgatggaaataaaagcctttcattgcaaggtactgaaggtttttgtaactggagaacaggtaggagtctcataagtacaaaatgacttggaaagcgaatgcaatcacacacaaacctgggctcttaaaaaatccaacaacattacatgcaagtaaagatagtataaaataaaatgctgatgagaaccaagcaagaatgactattgtagaagaacaattagctagacccgaatgtgttttagtttctccagacattgggtctttacagcggtttctgatttgaatattttggttaaaatttattaggtctcctaattgatattttccatcatctcaactcagtgatcgtgcctgggtggaaggtaggggatttacagaagacattgtccagatttgttttcagtctgtaagcctggccgtgtcaaagtgtaataagacaagcaggagaacaatgacaacagcagtaaaagccttaattgaaattatacccatggctgtttaatctagccctgctggttttgcagaccaggagctaagtcttcccatcagcactcttcccttgggttgctcttgacagctcttctgtctatataatgttacctttgcacacacaaaatcctgttttttaacttgaaacacatgaaagctttggaagggtttgcgtgggtatcttcattctcattcccttcaaatgttagactcttctgttcttcaaaatggtgaatcaatctttttccactttctgatcaatctataagattatatttactttcctgttaacaaaaaaggtatctgtgatatagctttcctatttatcactctgcccttcaaaatctattaaataagggaaatataaattaactcatatacaaaaattataccacataaacatcatttattttttatattttataacatatacacctctgtgggagacacaggatattaattagctttgtagaatataaaaatgatactatggtaattaacacttaatgttagcctttgtgtgtcactccaataacttcagatatacttccttcctatgtaaaacaatacattcccctttgtcttctggaagttagaatgatggttgacccttataattattaaaatgctgcccaaaataataacctgatttggcttgctacataaaataatttatataataaattaactgcattttcctgtgattcagaattctatcttggcaagatactcttctggacattgggcaatagcagcgctatcattttcttgtttgtttgttcctgaacaactggaggcactctttcactatccctggctttttctccttacataagtgaaatgagttcacgacaaagtaatgttcaagacatcaaaatgatgacaaagccaagagcaagaaatgagtaaggctttgttgcttgtggtttgagggagtgagaagtaccaccctctgaggtgtctgagtggatcacccaacagacttgccaagggctgggaaggaggaaaaaaataggttgaacaactctcctcttgggacaagtctcagagttacatcgttagtggtgataaaaatgtgcgtggggattagggcatgtaagtgaaaggaaaagaaaggaaaggaatggattggagtggaacagaggtagagaagagggttttgaagtgtgataactctctggcttccactctaaatcatacttctcatctttacaaaaatccaggatgcattttttctatgagctagccctttaagatgcctacacaccagtggaaaacagaaatgtttgaactttaccattattcttttttagcataaaatatatttatataaacaaaaataagtcacaagttatcgcaatggttgattttgccttacaaacttcagcttttttcttttcttttttactttgagtgttatgctgaaatatcgggggaaaatacttgtttgtaagtcaggtcatagctaaatctagatttggttcttttctccagcattatacactatgtgatgctaaaaatatagccattttacagataagaaaactgacccttgtgtagtgaaatttatactactggttaaatgtagtggaacagaactttgactctgggcaatactaattaggaaactgcactcatagacattgctgtgagtgttgctataatagggccctagctttcaccaggccttctaatcttttctttaccctgtagtcaacatgttctatctgcagtgtgaatctattcatttctctctcttcttaaaatccttgggcactgttaaaagggtaaccgtatcccccaacatttatttgttgaagtcctaacccccagctcttcagaatatgatcttatttaaaaatctggctcttgcagatagaattagttgaagtcgttagagtgggccctaattcaatatggccagcatccttattttaaaagaaagaaagttggacacaaacatacatatacgaagaacaccatgtgaacataaagatggccatctacaagccaaggagagagccaggaacagattcttcccccacagtgcttaggagccaaccctgtaggcaccttgatttcacacttctagcctgaagaactgtgagacaattaatttctattgttcaagctgcccattttgttgaactttgtaatagcaaaccaatacagatacctttctattattcttagcatgatgtccaacatcctacacctggaaagcaaggagtagaacatcaaactaaaaagcaaatgtgactcaagctaagcatagtaagatttctggaactgtgaatgggcttagtaaaaattcattgaataattatcataatcttacatgccaggaattgtatttacacaatgcaggaaccttacatgccaggaacggccgtatatttagatgtgaagtaaactgacacagtgcctgttctcagggagcttacactgaggcaggcaactaattacgcatataattaattacagtaagagtgaagagtggtagtggaatgtcccaaaaaataggatgctagaggagccaaccctcttcttgaaaaaaatcaggaaaagccagaaaggcttctttgaggtagtcatgtttgagcttatatctgaagaatgagtaaaaattagttaatgaaaggagatgctgggagaagtagctctgaggtcaaggggacagaaaatataaagattccaaagccagaagcattatgccactttccagaaccacaaagaggaaagtaaaagtggagcagaaaaggtgaggtagaaagttgtgcgcgatgaaatagaagcaaacagagtcaagtcctgtgggcagtgatgtaatcagagttgcagaccagagttaaaaggtgcctctggctgcactgtgaagaatagagctgaggaaaccacttaggaggctatggtaagaagtaatggtgggctaggagtggatggatttaagaagtagtccattgatgggatctagttgatgaggtccaacaattaaatagatgtcgtacagtctggagaaagggaggcatgtgttcaagttgactgttcattttctagcttggccgactgagtggaaaatagaattgttcactgagataggaaagattagatgaggccattttttttttcttcctggggtaaggagggagagaagaaaaagttgagtgcctaatcacacatttgaagcaattgtgagatgtgtgatgtcctgtagaacctcagcctcattgatcaggatgtctgagccactggagatgtaaatttgtctgtcattgggatacagatggtaactgaagccataggagcaattgagctcacctggcaaaagaaggtagaatgagtaaagagaagactgtgcacagttgaggaattctagcctttcaggtttggctggaggaagatggcccagcaaggatgatgactgacagaagcaaaaggagaaaacccagaaggatgtgttgtcatggaaaccaaggaaaaaagggagcttcaagaaggaaatagtggctggtaatctttaaactatggaagcggtttaagtttaaaaaatattctggctgttgtagccatttggctcttagcaagatctcttgcaggcgcttgagtggaggaaaagatggaaggtgtagaggatgatattggtcttctgtccacatccctctggaagtcactcgcatattccaaggactgcttattatgaacacctgtaactccttgcttggggcttttatttattttcattattttatggctgaagagtacccttagcctaagcacagagcaagccaaaatgacagagagtttacgtccccagacagctctgaaacaatgacaaacagatatttgataactaaatatcccaatccactggtcctcagttggaataatgctgaagaatgtttcacaccgtctctcagagctccccagagggatcaactggtttgataatcttcaagaacttgctgtcctgtctttctctgacatactcctctactcccctaccagtgtttctgggaatcacctaccaaacaaattactcactcttgaatccttgcctcagtggctgcttctgggaaaccaaaatcatatagaagaaaagagttagaccagtaagtataaacttagtgagaacagctgaaaaggagtatcaggaagagaaacacagtcaaaaatggcttattataatcaagaaagagtgctaagcttatttgactgagggtggaaggaatataagagacagaggggagagattttataggaattcatatgcagaaatatttttttttctgatgctgttggttaaaatataaaaggagaaaaaagaaaagaaaaaataataaaatttgcattataaaacttaggaaacctctttctagataagataaaggcacaaaagtttcctcttcaaaagcataaaagaagttctgatgttcttggacctttgtgtgtttaggaatttccaccatctctagaatccgtttaaccactccatgacacatttttttctctccagatgtaaaaactgaggagtcagttgtcagttgaatactctagtattattttctcagcaattattttaaggaatgcatttgaataaaatgcagttttggcatcattttaaaaaatggatgatgatttatgcttttcttgcggggacaagatggctgtgggcatgagtcatgactgtacgctgggaagattccgatgggaaccttgcttttgctggttgagccataacttacacggacttgagactgtgcgtggcttttattaacatgttcattttgcttgttaaggctcgagcttcatctttttcttcccgactaaagccctgtttgtatttcacacacacctgattcaaaatctgtgcttggaacccagagtggcttgggaatagtaatttggaaaaatttgattatttgtcagttaaaatggaatgatgtgttctcagctgcagctgggaaatgggctatttctctgcaggggagtaaattcaaatgatagacaaagttctaactcttccaacatccctgtcttcgtggagcaggtttggcacaaatcaaaattgtttataggccaaggaaggtacaaatcatagcacagatctgtgcttttctcaactgcataaagagctttcacatataatttttctggtgaaaaatccctgtcccggagcagatgttccatggaaacaacagtgaagtttttaaggggccaaggtgaatgaactgtaagactggttcttgaagttttccaggttaaaaccatctctctcattgtccttggaactggttttcaaaatgtgttttacagcattgcttctcagattttaacatgcatacaaatcacctggggattttgttaaattgcagactttgtttcagtagttcttgtgtggggcttgagatgcatttttgataagctcccaggggatactgatgccgatctatgtttatccctgaatcctactttgagtggcgagtaacagagggatatagaaagttggtcttgaaagattctctccaatacaaagattctctagtctaataagttcaaaaaaattcacatttttgtctttctctctagaattccgcaaattaacaaattaaagactctgagaagatttgcactgataaagtctgcagtcaatgctgtctcctaacaacctatggaatttgattttgtgaaaggaaaggataatctgatgtgcgctattcttgggaatatttgttcaggcacttaaacagactgaagggggatttcagaaaatgtttgactctctttgtggtgacccttgcaacttttctcaggtgagtgttactgcttctccaaataagcaagattctaagtccagctctcaatatccccagtagaataataaactttccacctagagttttggtattcagaatgtacggcgtgccttctaatcaactctaaaaattgttccgggtttagctgccaccatgccctgtcaaaaggccagcttagaaaagtgtcagacaggaaaactacaccaagggaatttaaatgcttccaagcatcttaaattgtttgcaaacctctgtatgtctatgaatcgattctctaataatttcccatgaagattcctggcctctgccccagaagtgattattctttgagtcttgagtatatactgagaatcttcattttaataagcgtttccaggattttctgatgcaggtgttgtaaagaccacattttgagattaagttctatttcctcagagttatagaacaagcaattgggctactttgttttggctttctgagcatgcacttttgtgagtcatgctttaatgttctaccctggatttttatggataatctatatgaatgaatgagaaagcgttagcattttctttggaaatgttattaaagatactgtcattatgccagacttcagaaacttctgtaaagggatcctgttggcagcaaaatataaccttgatcctgtagtttggagtatgagaacactacgacagatcatcacttgacatgtcttatggttaaagtgaatgcacgttttgctcctttttcttaagaaattcattggcattactataaacatgtaagcttacgtaaattttacccaaaattgttaagctgagtctcaaagtcatctgtggctttaggtacaccctggcatatccccatactctggggatattttctccacagcttgagaaatataggactgtatcgtgattagggacccagaaataaagaatgagtacattccccttacaatgttctccagaaataaaggctttcttatattaatatttttatatcgagatactttataatgagaattacatccttttctttttaaaaatgtcaacttgattggtaagaaattcagagcaaaattaaatgcttaattacaataatttttattggtctagctatttcatatatttgcaaaaattttccaacttttctatatacatttaatttcaacttttctggttagttatcttactctatatgtgatttttttaaattatactttaagttctgggatacatgtgaagaatgtgcaggtttgttacataagtatacaggtaccatggtggttcgctgcactcatcaactcgtcatctacattaggtatttctgctaatgctatccctccccttgccccacaacccacaacaggccccggtgtatgatgttcccctccctgtgcccatatgttctcattgttcaactcccacttatgagtgagaacatgtggtgtttggttttctgttcttgtgttagtttgctgagaatgatggtttccagcttcatccatgtccctgcaaaggacacaaacttatcgtttttatggctgcatagtattccatggtgtatatgtgtcacatttcctttatccagtccaacactgatgagcatttgtgttggttccaattctttgctattgtgaatagtgctgcaataaacatacgtgtgcatgtgtctttacagtagaatgatttataatcctttgggtacatacccaataatgggatttctgagtaaaatggtatttctagttctagatccttgaggaatcaccacactgtcttccacaatggttgaacaaatttacactcccaccaacagtgtaaaactattcctatttctccatatcctctccagcatctgttgtttcctgaatttttaatgatcgccattctaactggtgtgagatggtatctcattgtggttttgatttgaatttgtctaatagccagtgatgataagctttttttcatatgttttttggctgcataaatgtcttctgttgaaaagtgtctgttcacatcctttgcccactttttgatggggttgtttgttttttcttgtaaatttgttaaagttccttgtagattctggatattagccctttgtcagatggatagattgcaaaaattttctcccattctttaggttgcctgttcactctgatgatagtttcttttcctgtgcagaagctctttagtttaattagatctcatttgtcaattttggcttttgttgccattgcttttggtgttttagtcatgaagccttcacccatgcctatgtcctgaatggtactgcctaggttatcttctagagtttttatggtttcaggtcttacgtttaagtctttaatccatcttgagttaatgtttgtataaggtgtaaggaaggggtccggtttctgttttctgcatatggcaagccagttttcccaacatcacttattaaatagggaaacctttccccattgcttatttttgccaggtttgtcaaagatatgatggttgtagatctgtggcattatttctgaggcctctgttctgttccattggtctatatatctgttttggtaacagtatcatgctgttttggttactgtagacttgtagcatagtttgaagtcaggtagcatgatgcctccagctttgttctttttgcttaggattgtcttggctatgtaggctcttttttggttccatatgaaatttaaagtagtttttttctaattctgtgaagaaggtcaatggtagcttgatgggaatagcattgaatctaaaattaccttgggcagtatggccattttcacgatattgattctttctatcaatgagcatggaatgtttttccatttatttgtgtcctgtcttgtttccttgagcagtggtttgtagttctccttgaataggtccttcacatcccttgtaagttgtattcctaagtattttcttccctttgtagcaattgtgaatgggagtttgcccatgatttggctctctgtctattattggtatataggaatgcttgcaatttttgcacattgattttgtatcctgagactttgccaaatttgcttatcagcttaaggagtttttgggctgagatgatggggttttctaaatatacaataatatcatctgcaaacagagacaatttgaccttctctcctcctatttgaataccccttatttctttctcttgcctgattgccctgtccagaacttccaatactatgttgaataggagtggtgacagagggcatccttgtcttgtgtctgtctgtctgtgggtttgtgtctgtgtgtctgtgggtttgtgtctgtgtgtctgtgtgtctgtgtgtctgtgggtttgtgtctgtgtgtctgtgagttttcaaaaggaatgcttccagcttttgcccattcagtattatattggctgtgggtttgttataaataggccttaatattttgaaatatgttccatcaatgcttagtttattgagagtttttagcatgaaggtgtgctgaactttattgaagaccttttctgcatctattgagataatcatgtggtttttgtcattggtgctgtttatgtgatggattacatttattgatttgtgtatgttgaaccagactttcatcccagggatgagaccgacttggtcgcggtggataagctttttaatgtgctgctggattcggtgtgccagtatttgattgaggattttcacattgaggttcctcagagatattggcctgaaattttctttttatgttgtgctctgccaggctttgatatcaggatgatgctggtctcataaaatgagttagggaggagtcactctttttctattttttggaaaggtttcagaaggaatggcaccagtttcttctctggtagtattaggctgtgaatctgtctagtcctgggctttttttggttggtaagctattaattactgcctcaatttcagatcttgttattggtctattctgggatttgacttcttcctcctagtttatcttgggagtgtgtatgtgtccaggaatttatccatttcttttagattttctagtttacttgtgtagaggtgtttatagtattcgctgatggtagattgcgtttctgtgggatctgtggtgatctccactttatcattttcattgtgtctatttgattcttctctcttttcttcttcattaatctggctagcagtctatctatttggttcatcttttaaaaaaaaacagctcctggatttactgattttttgaagggtttttcgtgtctctatctacttcagttctgctctgatcttagttatttcttgtcttccgctagcttttgaatttgttgactcttgcttctctagttcttttaattgtgacgttagggtgttgattttagctctttcccgctttctcctgtgggcatttagtgctataaatttccctctaaacactgctttagctgtgtcccagagattctggtacatgatgtttttcttctcattggtttcaaagaacttatttatttctgccttcatttccctatttacctagtagtcattcaggggcaggtttttcagttgtgtgattttcagtgagttttttaatcctgagttctaatttgattgcactgtggtctgagagactctttgttatgatttccattcttttgcatttgctgaggagtgttttacttccagttacatggtcgattttagaataagtgctatgtggtgctgagaagaatgtgtattctgttgatttggggtggagagttctgtagatgtctattaggtctgcttggtctagagctgagttcaagtcctgaatatccttcttaattttctgtcttgttattctgtctaatattgacagtggggtgttaaagtctcccactactattgtgtgggagtctaagtctctttgtaggtctctaagaacttgctgtatcaatctgggtgctcctgtattgggtgcatatatgtttaggatagttagctcttcttgttgcattgatctgtttataattatgcgatgcccttctttgtcttttttgatctttgttggtttaaagtctgttttgccagagactaggattgcaatccctgctttttgtttgctttccatttgctttgtaaattttcctccatctctttattttgagcctatgtgtgtctttgcacatgagatgggtctcctgaacacagcacaccaatgggtcttgactctttactcaatttgtcagtctgtgacttttaattggggcatttagcccatttacatttaaggttaatattgttatgtgtgaatttgatcccgtcattatgatgctagctgcttattttgcccattagttggtgaagtttcttcatagggtcgatggtctttactttttgatttgcttttgcagtggccggtaccggtttttcctttctatatttagtgcttccttcaggagctcctgtaaggcaggcctggtattggcgaaatccctcaacatttgcttgtctgtaaagcattttatttctccttcacttatgaagctcagtttggctggatatgaaattctgggttgaaaattcatttctttaagaatgtttaatattgacccccactctcttctgccttgtagggtttctgcagagagatctgctgttagtctgatgagcttccctttgtgggtaaccctacttttctctctgactgcccttaaccgtttttccttcatttcaaccttggtgaatctaccaattatgtgtcttggggttgctcttctcgaggagtatctttgtggtgttctctgtatttcctgaatttgaatgttggcctgtcttgctagattggggaagttctcctgtatagtatcctgaagtgtattttccaacttggttccattctccccgtcactttcaggtacaccaatcaaacgtaggtttggtcttttcacatattcccatatttcttggaggctttgttccttctttttcattcttttttctctaattttgtcttcatgctttatttcattaagtttatcttcaatatctgatatcctttcttccacttgatcgaattggctactgatacttgtgtatgcttcacgaagttatcatgctgtgtttttcagttccatcaggtcatctatgttcttctctaaattggctattctagttagcaattcctctaaccttttatcaaggttcttcgctaccttgcatttggttagaatgtggtcctttagcttggaagagtttgttattactcaccttctgaatcctacttctgtcaatttgtcaaactcattctccatccagttttgttcctttgctgttgaggagttgtgatcctttggaggagaagacacattctggtttttggaatttgtggcctttttgcactggtttttcctcatctttgtggatttatctacctttggtctttgctgttggtgacctttggatgtggtttttgcatggtcatcctttttgttgatgttgatgctgttagttttccttctaacagtcaggaccctcttctgcaggtctgttggagtttgctggaggtccactccagatcctgtttgcctgggtatcaccagtggaggctgcagaacagcaaagattgctgcctgctccttcctctggaagcttcttcccagaggggtgcccaccagatgccagccagagctctcctgtatgaggtgtctgtcaacccctgctgggaggtgtctcccagtcaggaggcatgggggtcagggacccacttgaggatgcaatctgtcccttagcagagctcgagtgctgtgctgggaggttagctgttctcttcagagcaggcaggcaggaaagtttaagtctgctgaagctgtgcccagagctgccccttctcccaggtgctctgtcccagggagatgggagacatactggggctgccacctttctttcagagatgccctgctcagagaggaggaatctagagaggcagtctgactacaatggctttgcagcgctgtggtgggctctgcccagtccaaacttccaggcagctttgtttacactgtgaggggaaaactgcctattcaaacctcagtaatggtagatgccccaccccctacaaaactcgagcatcccaggtcgacttcagactgctgttctggcagagagaatttcaagccagtggatcttagcttgctgggctccgtggggatgggatccgctgagcaagactacttggctccctggcttcaatcccctttccaggggagtgaacggttctgtcttgctggcattccacgtgtcattggtgtacaaaataaactcctgtgggtagctcggtgtctgcccaaatggctgcccagttttgtgcttgaaacctaaggccctggtggtgtagacacctgagggaatctcctggcctgtgggttgtgaagaccatgggaaaagcgtaatatctgggctggaatgcaccattcctcaagacacagtccctcatggcttcctttggctaggggagggagttccctgactccttgcacttctcaggtgaagcaatgctctgccctgcttctgcttgccctccatgggctgcacccattgtctaatcagtcccagtgagatgagccgggtacctcagttggaaatgcagaaatcacccaccttctgcattggtcttgctgggagctgcagacagaagctgttcctttttggccatcttgcctgggaatcgtgattttaaaagtaaggcacattacagtattatagctttaagttgatagaggatacgttattaataatttttttattattgacttaaccatcaatatcttcttactatttaagaaaatattgaatactcttcaatattactgtggttgattcaggttcttcttgagggttcagcgtgtaaaacttgaagctgctacaaggcaaggtgatgtcgatccagaggtcaagagagaataaaaattattcttctgaggacttctggatagctctgctactttacacagagtcccagaaactgtatcactgaattcctctgcctttacatatcctgtgatgtgtttttgcataccttctcttatcagccttccccaaagcactataagcatcatctttacctttaggctgaggacagaggcctagaagacattgaatgacctgcccaatgtcaatcaaggaagacgtagaactgacattgaaacttggtctttagatcccaaatccacaattatcctcctagaacacagctccatatagtatgcctgaattgtctcatttgttacagcctcttggctttgccacttgttcaaatggaaaagtatttggctgaataataactcagtaaaaggtatgtgtaagaaaacaaaagaaaacatgtttgttttaagaaatcaatatgccagagtttgacaaagggctaactgaatgtttctctttgcttataaggtatttgggtttgtcttgaaataaaatacagggatgactttagcacaaaggaatttttttaaaatttcaattcattggctaaacaaagcatattattttaataggaataaagtccacatgagtattgcatacagataaatttttcaccaacaaactgcattctccccatgctttagtgacgtcttggactaggaattaaatgacatccacagaatatcatggcaacagttaacactgggaacagttaacactgggaagcaaaaccaaacaaaacaatcaacagcaacagtcaattaacctattgtttgttccacattatctcaaacatttattctgattttaaatatcttaattgcctcctttatttgatggagaaagtactcagttgtggaccatttggaatgctgcattgactctttcaggttggagcaatttaagttaaactgacaaatacagtcagtctcaatctctctctcctttcttatacatgtacacatgcacacacacacctatacacactcaagaacaaatattgacatatgcaatggggcatggtgaatacttgataaataattcttgaagaagaaagatcaataagattgctctctgtattagccattctcaccatagccacccaatgagatgctcatcgaccatgggtcaccatgctgatgaggaaaagccttttatataagtgacaaaaccccagggcagagccattgtggggacgttataagtggatagtaatcagccggagaccagagacatgtctgacacttgctctatatcatccacactatctagcgtagtgcatagcacctagaggatgtccaattagactttctgactggcagagtgagagaaccaatgtcaactactttcactgtctgatactggtgaagtgggaagggagaaagtttgtgtagtaaagatgtatagagcaaatggaagccaggaaaaaagtgaatattttcacttttacctctcccttcaatgttttttcttgtagcatatattaataattatgataatcactctttgtattgggatatagtttattatgtaatttataccactgttattatttaccactatttttgtatttctttgtgtatatttatagcacatttataaataatacatgacatgtccattagatacttatgtgtaaaagttatacatattcaacatttaacttcaaagtcagcatcctgtaatatgagaaattttactaaatgtaatgctctagtccagtgacaataaaacttataacatggaattgattctccctcaaaggcaacttcctttgccttcctagcggaagtgaaaactttgacctaatgaaatggtaaaacaaacccccactcacattcagttgccaacaagaaggtccacagcctgaacacaggaactgagcacaggaaattcaatatttgtcttgcattataagactattggagccataaaaatattttttttaatttttgattatttgagattcaaacaatgtttacctacaagataccagtccataggacactatatactggcagaatgccagcctgtacacatacagcctctactgtgtgtacagatggtggccattgggctttggcttttataaactgaattaacaaacatttaatggaaaccaggtttaacagatagcttgcccagattgaggaggaagtttttttgttgatgatttttttttaaattccttcccactgacagctgttacaaaagcagacaaatattaactcttcatcttgtctattgactcatagcaacacaaatctcttgcatctacttaactttttattttaaatttaaatttatttattaattgtttttacaattttggattctcccagctatccatttgcttcttacttcaagcaatgagctctgatatggtggtcacgggcattgtggctgaggttcttaggaggtgggtgtatagaattgaatccacgagtattgttttcttgccagtgaacactttgaaagacgctgagaataaattgttagggccacaaaatctatatcctcttatcacatctactctgtgggctagacttttccacagtggcttggggaatcaaggggtcctgctctgttttcactttcaagtccatcaaaggcacagagcagccccagaattttaatgactacatgaacactgataaggttcaatttctattcactcactccctatggtgaaattaatggtcatatatacatatgaaatatgaaatcctactgtgctttattaatataactttatggaaaagttttttttggaaaacattaacttatatgccaaattcaacaatacttttcattataaaattagtgtctttattctgaatacttacagcaattctccttgaaaaaatcttcaagaatatcactccttgttactgatggtttgtgtatatcttaaatctcatggtagatttagggttgtcagataaaatagaggataaccagttacaattaaatttcagataaataaggatttttttagtgtaagtgtacccctagaaatacgcatgacaaaaatagcctttgtgtatgaaattcagatttaactgggcaccttgtatttttatttgcttaatctggtaactcagtagattgtaaatgtctccagccatcagagtttaggcttttctttgtctgatacttgcccggcttgcatgatgccctctaatgatataaaatcttactaggaataaagatttttaagtttggttcaaagctctttacatttacttaatagataagtattcttaggcactattttagagagtatgagtcatatttgataatattgaaattgattatgggacacttttataactcatttcattgttcttcagtcaaaaaaggcagtggatgtcagaaaacgaggagcaaatcagaaatctggagacctgagagaagtgagtgagttttatctctgactcaaactattcctgggtccttctattacctgtgtctgtgaatacatcaatgaccatcgtggattcattgcactaaggaccccaattattttccccttcctgcattcacaactctgacacataaggtggtggagccgatttccctaccccttgattctgactgtggccatgtgactagttttggccaatgagatattagcatatgggacacatgcagaggcttgaaaaccaacttcgcttctatgtttctgctttcaactatgtgcttctgcctttgctaggagaacatgccagggctggcctgttggagggctgggagagtgaggtggggagcagcatttaggttgtctctcacccaagacagaaaataatcagattgacagatttcacttttctccaagactcattactcatctgttgtgtgtagatttcggcaggggttcaagaaagcatattgatgcatgtatgttgcggtcttaatgcaaatctgatctagccttagaactctgagcataccaagaacctaagggtaaatttatttttcatacgcattacccctttgaaacttgaagaaagacaaggaggaacatagaatgaaaagcagattaaaatgaagggtacgtgctgaaggctggttggtccacacggtaagagttttatgggcatcttaagtgggacatgtgagggtgtttaggtgttcattagtgtggtcatgagattggctgaagttggaaatgaatgctgaatggaacttatttcacccagctgcatgtccaagtttctatgactgtctgacttgttatttacagccatcaacaaacagagtaggaagatatgaacgtttttgtttgccatgcttgacagaatgttgaattaatatctgagctctacatgttatcaacagaacttttcgttctgatttactattaaaatatttgatttgtttccatttctccagatcagacccagctggatgtcttatacctcctcttctttgtcagtagactcctgaattattaagttcaataagaaaggaaagggatggaaaggattcggagtgtcttatttcaggtgtaaacctttatgatgtcttcgtatattcctgtaccggtaagtaaactgaagttttacagaaagttacaacctgggcttaaataaaacatgcaaagtactataaacccaaattctcatcagactttgacaagagttcagagtgtatattcagaaacctgtgcaaataataacaataacaacaataaaattcacattactaagcagctctaatctaaatgtcaatataactctaaataatacaagcagatgaaagcagtgtgcattttcttcaaagtttctaactttggaaggaattcctagatataataggtatgtgggaaaaaaatcatgttgacagcacaacaattcattcacttcctaacatgactagtcatgtactgtactttagtgcaaacaataaggttattgttcagatgggaaaacaagcaatttgttggaaggcgaaaaggtgaaaatgttctataacctgattttgttttggcaggctgcatgtcattttttagtcttaaaagatgtatttaatagacacacgtttaaagatttggccatttgtgaaagaaaggattccttctagttttcttactgcttttgtgcagaattgttttctcctttttatttttatatgtttagatccagaggcctgacattctgatcaaggatagcagggtcccagataacactgtctgttctgtttctctctagcgtgcaagcattggaggtttgtggctggaaatccttcaaaggtgacaatgtacagaagagttgatatgaatcaagactggatgaatgaagccattggtaggtacggtttatgctccaatcagaggattttgccagagcagcctcatggtttgggccacctcctttccttattttgcatcactttcttggctgactatggtccaataggaagtggagtagggaggagagaagaaagagccaggtactttgagagaaaggatagaagtttggaatgccttgtactgtgtgtattcccacatttctgagctctacagaattaaggtgttctgtttaagttaatggtgtttggatatttgcaaggtggctttggggtactaatgatctccaaataaataccactcatataatgtttagagtctattttaaccattttcttttcttaattaaaaggaagacacctgaatttagtctgaggtttttctggaagtttctaaacatagggacctgtttctttttttctttttttgtgggggaaggggttgccttttagttttaaaaaataccctatttgtattttcttcctttttttttgtttttgtttttgtttttgttttcagtggcatgatcatagctcactgcaaactggaactgttgcgctcaagcaaccttcccacctcagcctcctgagttgctgggacttcaggcacgtgcggccatgcccagataattttctcattttttgtagagataaggtctcactctggtgcccaggctggtctctaattcctggcttcaagcagtcatcccgcttcagcctccctaagcactaggattacaagtgtgagccactgtgcctggtcctgtattttctctccaagcacagaatggcaggcacctagcccttccaggccacctttcccgccaaaaaaaatatttaggtacacacacacacacacacacacacacacacatgcacacactattaataagctcttcccaacctgctcctctcaatttccatccttccatcctggtgtgaaatattgaaatacctaagaaagatttaaggcaagttcttaactagtaggggctggatttccagctccttatattctgtctacagaaactgctgtgggcgccgtggtcagacgagatgcttcttcctacgtttgtttataagttcctcccaagcatttggatcactctggtttccatttgagtgtctgcggctgagagcaaccatgtgagcaaaaatagtccaggggcaaaacaaactcagacaggccgtagtgtgcaaggaactgcagcctgaaatatctgcattgtcatcagtcagtgctaaaaggaggtcagtgatgtttctggatttgaggcataagcaggatatggaatcttggaaggttttattctattgatatccatgtgatttgggggtttttgctaatagttcttgctgctaactttgactgccagagtaaataacagtggccaaggaaaaaagacttctggagctcatttaaagaaaaatgaaaagagttttttcctgccaacctgggcttcatctttcaacccacaattaagagagattaagactgagacagatatacttcaatctggtggacagtttgtaaaagaggagtagtcattttcaatttaatttttatgtattggtcttgatgactgacctgatgattatcatattattgggtgtttactatgtgcccctctttaattatgtcatttagttccctccaacaatacttacaaataaatgctattactgaccccaatttgcagataggagaactgatggataagctataagtggtttgccgttcatatatggttggcatgtagggaaaatgaagatggatctgaacttcaggaaagctgcatccgagcaacgtgcctagtagttacccaacatttttattaatctatccttagtttcttacaatactttactttttccctttttcatgaggctactctgaaaatacctgggatctagattagagagtacagaaaaatcagtcattgacatggctgttaaagtttgagggatttcaatggtttctgccaacactatcatcaataaatgcagataatcaggaactgattctatcctaatttatatagccatcttactatttctaagacatatttccctttaatgtttttccattcagaaaagtaatttctgagatttagagacacaccgtcttctgaggaactccacaatctttataccagatttttttggtatataaaacttggtacctgtttgaccttagaaatggcctgtaggctaaataataggatgaagatgtcagggaggaaggggatgccgcctagcatagtgatgatgatgactggctatgacaccactaaccaagtccaaatattgattttaacactaatttttgcctttggcaagttaagtagcccttccatgcctcagtttccttacctgtaaaatgagtgtaataaccgagcgtgcttcatggagttatgaggtttataatgggcattttaagcattttaaatcatgttttttaccagtactcaatacaaattagatatttttactcattcttaaaggtgtgacacttcggtgacactaaagtcaccaggggtagattgtgtgtactttctgaaaaaaatattctagagttttgcttatcagtgatataaggttttctgtgttccatgcatttaatttcgtatgtagttggcattgccttactgcaattaggcaggttggaaaaataggtgtcattcattttcagcatctccttcttcctccctctgtgcatacaatttgtcactcaaacttatagaccatccctctattgtgactctgaaattccctcctttctgttcaccaagttgaaactacttggcatctagtgcaaaccagtgtcctcatacccccacctcctgcccccacatggatacacccctcactcaaagcctcctggcagctgttccataccagattcctttgccatctcagctgccttctgcagtttcttcagatgccctaactccagccataactttgtctcttctattcactttcgtggccctttcatttcttagcaaattcttatttcccacctgtacttgaggtccttcagcctttgcattatcccccacttccagagtttgcccccattattaatattagtaataatttcacatttcctttgctcttcactcagagctttgggacaggcctagctctctgaaatccagcgttactcagagttatggtccctaaccttgccaagatgggaatatgcaacattttctgttagaccagtgtctttcatactctactcttccagggatttgactgaaacaggagattctaggttcgtaggtctgggatggagcctgaaattctgtgtttttaacaaactcccaggtgatgcagcagctgctgctgtgagtatctcctagagaacctcttaatgtttctctctctgcctttcaccctcacttctccattggctctgctgccagagctgttcccttaaataattctgcttagttattgttaatggctccccatggcttatagaaacaatccaaacacatgtgcagagcattcaaggcacgctaattgaaattctactgaatattcaaggaccagataaatattaataacaactcctccgaaactgagctctactccttgtcagccttcatcatccctctgcacacaggttcctactttgcacctctgcattgccctttcattcctttgcatggattcatagatgctaggtgtttgttcatccctccactctgaagagctcattgagcatcccccacagtcccagaataagcgaagagctgggggtatagccaacattcactaagtgcctgttcacatgaattgtgttagactttgagtaaccagggcaaggccacaggggttgatccagcaatggagtccagggaaatgatcatgatgaaaggttttgttataaaccaattaaaaaaaaactggggaagaggtcagttgtaaataatagagctatgcataccagatgcagaactgagaggaaaaagcactaagcctcaacattgaaaattttaagcactgattgaaaattactaccagcttccttctttggcagatggtattgcttgaaaagtgttgtttctatgacaacatggatctgagagaaatatatcattaatatctgggtgttagatttgagggttggtgggacattgttgattctgtcttcatggttttatgagaatatttacccaagattttgaatccctttctttttctgtctttgataaattcttagaactctgtgggcaataattcattactttaaggatgggtgaagatccatttttttcccattataatctgctttaattacttatttaattatgcttataaaatgtaaagttacaattttttaaagcattacttatttgtatactaggaaaaagtgaacagctcttacaaatgggtttagttaatattacaataatcctgaattactgagtcattggttcagactcattctctatgattaatttataatcccagcagttaatatctactttaggaaattaggattcaagcaagctttccattcttaacattctatggatacattcactggaagctgcaaagactcctttaactcaggacttgcatgggggctgttgtgtaggcaaacagtggctcccaagatcctgttttattatctggttcagccactaaatagtgtgtgatcttagactgtcccccttaattccctgaacttcacttttctcacttacaatagatctggaagaaatttattcaatcggaagtatgtatgagacgctggtagaccaggggatatgcttctgtgtttagagtcctgtcctccaggaactcataagatacacatataagtcgagtagatgagaggtagaatgcaatgggaacttgtgagctaagaagacaggattttcctggattcatgagctctgtgtttatatcatattgaattttttaaatttctgagggttttgtttatttgtttgtttgttgtggaaacagggtgtcgctctgtcacccaggctagagtgcagtggcgcaatcttggctcactgcaacatctgcctcttgggttcaagtgattctcctgcctcagcctcctgagtagctgggattacaggtgtgcgccaccatgccagctaattttttgtatgtttagtagagatgaagttttatcatgttggccaggctggtttcaaactcctgacctcaagtgattcgcctgcctcagcctcccaaaaggctgggattacaggcatgagccaccacgcccagctgaacttcttaaattttataaactcagaagcatctttctcatcctgtgttttggtgacttctgcctatgcataaatgtgacttttctctttctctctataactctctcctttgcttttctaccttttcctgcttttcttttaagatttacctcaagaggactcacatgactaggtctggacatccatacccttgtctttgaattatatctcagcaccatattatggtatttatttatttattgtcatctcactagatataaactcgtaggacagggtcttttaaaaacctgtgatagtaataactactgcatagtggatacaatacatatgaattaatcagttaatgaattaactaataagggtcaataattagttaattattattattattttgagacggagtttcactcttgttgcccaggctagagtgtagtggcatgatcttggctcattgcaacctctgcctcccgggttcaagcaattcttctgcctcagcctcctaagtagctgtagctggggttacagacatgcaccaccgtgcccggctaatttttggtatttttaatagagatagggtttcatcatgttggccaggctgatctcgaactcctgacctcaggtgatccacccaccttggtctcccaaagtactgagattacaggcgtaagccacagcacctggccccaataattagttaattaccaatgcttgataatgtcagtactttatgtctctcaaaatatatctctttacatctcttagatccttgttcacagagttcaaatgattttatagtgatgtgcatcatataaggtagaatgtgacggtagaattgttctattttgtaaaaaaattcaaataagatgagttttggtttgacactttattcttatttcatttatgcagccttccctttgcctctcagccatctctgactttggactcagagccttgactgagtctctgactcctatttgacccttctcatatccagctttgattttctttctttttaatgtatgcgtaatctttatcaatgcttctgtgacctccccggcccccaaaacgtgtatagtttaattgctctttaagaaatttacagcacccttgaatataaaatgaattgtttgttggttgcatgtatgtagccattgaagtgggcaatataccaacctgtggtatgtgatcaatgacactttgagaaagaatagacactcaggtttggtgtagttaagacaaccatttgtgagttactgctttatttactaaatctccacatacctgaaggatcatggagaggaagaaaggagccatgtcacagaggtgtaatggaccaggcattccaaccagggctacatcagaatcacctgggcttttaaaggttcagatgtccagactctttctccagagaatctgacttgggaggtctggatggagccatagcatcatggtgcgtaaaactcctacagactgcactgaaaaagagggttgggaagctctgtggtaaactgatgacaattaggagagatttgtcccaaggacttcgtgactccctcaagggatggacaaaagttattgcttttgaaaaagtgaccctgagggcctccattgtctttgtttctgagaacatattttgattttaaagctgtttgtgtgagctaaccagttttcatgagcacaaaaacaatgtattaattaaagtcaaccattaagttgaagcagaaatgccagtctatggacttgttgattgttgacagattgtagcagaggaagtagagccagttcacagactatacattgtaccaacaggactaaatgagttgatctttgaaaattctgtagcagaccatttaaatgtattcatggactttcttagaaaataaggaggctgtgtggtctccggaaaaagaaatcaggaccttggacctcctcccagggctgctactaaccacacatgtgaccttgggccaattatttaacctcttgaggtcagttttcttatttgcaaaatgcatggactatattaattattctccaagtccaccctcaatatacaattctataatttaatataatctaaagaattttcttatatttctaaaacacctaacaaggtaaagttctccctggaaacaaaagccaaaaaccgaaatacaactggtgttatattttgtcctgaatttcatgtatcaagataatttatgttggttcaccagtgcttctcaatgtggacttcctgctaatactccgtacttggtttcctgctaatactccatacttggtttaatctctcggcgtttcagtagtgacattcatggaagaaagataaatctgaatgaccccaaataacagatcattcagttcagttaagtaagcttattctcttaaatctttttctgaagaataacatgcagagaggtgcaaaaattttacctatacagtttgatgattttttccaaagtgaatgtgtccatgtaaccagcagtcaaatcaataaacagaacattaaaggtgcctccaggtgccagctggcatgctcccttctagtgaccatctcccatgctcttaagggtaaactcccattatcctgacttgcaatattacaagctagatttcgcttatttttatgcatatttgtttctgtcttctattgatattatgttttgaaattcattcatatggcaatgtgtaacagagattgttcattcttagttgtgtatagtacttcattgtatgtgtatgtcacaatttaatgttgattagcatttgggtagtttccagtttgaggctcttacaaatcatgctgctatgaacactcatatgtcttttgataacatatatctgcatttctgctgggtgtattcctaagagaggaattgcttggtcatgaggtacaatacactgttctttgattgcttcataagaaaccggtgtattgctctgtgctgaggtcttagatatgttctagcactcaggagtccaaaccattgcttttgggttagaaatgcatgaaagaaacatgcacgtctatctgaactacaaataaactttctgcttaagtctacttaggctaatgttgaaacatttgttcattcaacacaaaccacatggtggcagaagaagagagaccctcattacaccacatagtagcaataggagctgcaatgtcacaatgagttttaaaaagaatgcctctttaaaagaaaaaaaaaaacaagaaagaaagaaagacatcatgttctgctaatagtcccatttaaagtcatctggggagtattaggcacggcgggactgcactttattttgctttgtttttagtttaactgaggttgcagacaatacactcaagacctggaacaagggccccccacacatcaatccctccaactgatcctgagatttggtatataaaaagcattatgattctttcgtcccaagcctccctgaaggatccaattttaggcctctcagaaggttacctgctcactctttccactgtgcatgggggagcagtttggcctgaaggacagttccaatgtctttgtgctactattattggagatttgtttctgcctgaggtcacgtccacctcatcagttagtggcctgctggcccttcaatgaaaggggccactttaggtgatgcatttgggcttagatttgcagcagatcctgagaaagtctgtgggtgactgaatgggtgtcttcaggaagttggaaagacctcacttgtcttcatcagagactcaaggaaggtctgggaaggactaaatgagttataatgcctttccctgtcagcttatgaagaaggtccactcctgttgtacatgtggggtcttggatgagcttctctggaagcagagcctgagacagatttgggtgcacatgactgcacatgacttaatgaggatgagcttttgtaagacggcaatgagtgaagcagggtaaggcagtggaagataccacacatgtgtcattttgcctgcttctatagcagaaggtggaggtctagaatataaattgcatgacctagaggtttaggggccagcattctgtaccctttgtcattcatgtcaattagtcaccagttgtaatgtaggctgccagtgaacagggcatgtgcaatctcttaggtaaggacactcccttttggccaaggatatttcttcagagaagtgggcagctgagagccattagtaaccaatagaagcagggggatggatacatgagtcaggaaagggaatccaagtggggatggtaacagcatctgctatatacaaattgtgattcttagagatcttactccagggcataggagtaggggaatcattttttctaaatgtttggttggtcttactttatgatggcatcttctgcttgctgataggtatctggccaatttttatcaaacttgttctggaacaaaacctgtcccttctcacccaactcccaatttcacaaacactctgtgctcttttcctgattcctaacatcactcacctcttatatccagctgaaaatccactatacttctcacaatctggcaaaatatctcacttcctctctaaaatccaaagtatgtctgtcatcttcagccaaatttatctcctatggcagtcagctcctgacacacagtctaacatttaattgctggtgttgttcacttttgagatatgttgtattatcatcatacataggctataagactgctttaggtagggattctctagaccatgagaccatgagatgaagatttaagtgtaaggatgtgattccaggaagcactggtagaaaaatgttcacgtgagactggggaggggagacaagcaattcaaagtacattgccaagtttaccactgtcaatgattggcacataattccaccaaggacttatgggataatcttcagtgcacatcttaaaattgtaccacccaaggggaaggaagtgggacatttatcttccaactcttgttcattattagtgaaggcttcacctgggcagctaactttttggtactactagagtgtatagggcaacctcctcctaccagagaacatacttaagctgatagaggtaggttctcacaataagaagtctgtgaatgttgagaagatatgggtgggatacctgccctgagcttctggaagacaagaatgacatatgcatcaaattcctccattctagtttacaaagatcatgcattaacattcttgtttcactgatatgttggttgctgatgactgagaagtggtgtaaatgtcagtgttaaatacagacttatattagcagtcttgtaagatttaaggagcctaaggaagtaactcaacagatgaaaactaaacttttccaggattaaatgtcactatatttttgccacaccaattaatggaagttgtttatcaggagtttcatgaatttgatgaggctgtatcacaggttggatactcaagcaatagtatttggggagatattagatatctatgcagtttggaacatctaccacaaagacaaattcttaaattcaacctctagttgtcacggcactcaatcacatttctcatactctttcactatgacacttttttttccaatttttctctaatgtttgtgaagttcctataaactagtttggttctaaaagcagaagtaatgttgggtgtctttcctttctgtatcaatactaactgcacctattttataatgaaaaatctcacagtttaagttctgcctgcaaactttcctctttgaatattgtgttttttattctttcatgcattcaacaaatgcttttccagtgcctgctctgtgccaggtgcaattgtagatgcttgagatacatcattgaacaaacatctatttgctttcagtgggcttatatggtagataggggaatagtgtcattcaataaacaaaataaatgagtaactaatatagtatatgagaatatgttgtattatggggtaacattaggatgggataggggtataagaaacataggtgggtgagtacaaattttttataagatggccattctaggcaatgttgacaaagtagtctaaactaagaagtgaaagaagggaggtttgccaatctttttatctacattggctggaagctacattatttccttttctgtgaaatatctcatatgttttcttttatgtcttctagttcctgaaattaaccaccaaacctcccttctcctgaattctctaagcccattgttacccatttcctttcacatgtaataattttgactctcatgacttttgcctggctttttctaacacaaatatcacttcacagaagcaaagccaattcccaaacactctatatttcccctacttttagagtcaatcttattacttcttttgacatgcttaatgtgttcctttggatgtcaaccttgttttctttcctttgcttggcttagactatctccttttaggaatagaatttctccttgctcattttctttcccccgtccttcttcccatgcccatcccataccaaaaaaaccacccacatagataaaaacataagtctacacagttcttatgcttaatttagctgattccatgtgttttgatgcacacgggaccaagtgccacttatgacttctttccaaactaaatgactgcttcttcaaggaacatttctaaaacatgatcacagtttgttctcaagcttttttgggggatggggtgggtacatttctaaggaatctaagcaatgcaaagattgcatttttctagaatgtcccaaatgaaatgccttttcctgcctaatcatgctctgtcagatgctacagacatttggtttcttcttgtgggatctctacccagtatattgctttattcaactttatatttatcgatttgtcctctctggtcttcaacagatatattgcatatttatagataatgaggaattcattatttcagaacccaaatatgagaaatttatctgaattcatatcgagttatttttcttgtaaaaacaacagagtaaaactatttttgctttctcctgctttccaaacatatttaggaccaggaacaagttttgttacatttgtaactcattggagctttactttatgacttaagtaaaatataagtgaatttatttttgtaagatccagaataaatttatgttacataatttttgtaaaagctgcatatacattaggtttggataatccaaatcctattttaaatgtacaaaatagcccaatgtacaggaaatttatcttgtctacaaataattcttttaaaaattaatgttcaactactctatggtcaaatacttcaagttgcttccttctccttcttcttttttctttcttttcttcttttttaagatagggacttgctctgtgcccaggctggagttcattggcataatcatggcttactataacctcaacacctaggctcaagcaatcctcctacctcagcctcctgagtagctaggactacattaatgcactgtccagttattttattagtttgtttgtttgtttgtttgtttgcttttgtagcgacagaatctcactatgttttttaggctttcttctttttatttgatttcaaattaggtagcctaaaacagtgatgagaccaccaatacattttttttttcattttgacatatttataagtaataaaatacaattcatcagaatgtataactctgaattatttttatattctttatccttcaattgtcctgaggattttatgacctgtctggtgaatttcaagacttgccactgtggagtggcaaggagtagagtttggccacagaagtgatccaaaccacatgaagaatgtgcattaacccaaacacctctaactagacatgttcacgtgtccagacattgagtccagacttggactctgtaaaatattggatgcaacggcttaactggtttaagctaaatctcctcttgagatttccactgcagttggaaagattcacaaagaaacaataaagctttttggttgttgtctggccttaaaatcagagaacactgaggtttttttttctttttgtttctccggtttttgtttgtttgtttttttgtttgttttgttttgtctttttgttcttagagagaaggactcattgatatatttcccaaactcttttcctgctgcccaacctaccctaaacaacaaaatccaggggaaactaaaaaggcctgaatcccattttaaactacctgaagttgaatttttttgttaccaaaaaaaaaaaaaagaagaaaacaaacaaaaaaaaaacattggcgatctgtatttttgtctctggatttgggaagcctggactgaaaaagtggtcatttattaattggtattagagttacatttttatctactaagggatgtggactagagaacaaactggggcaatgattaagatgtatttgcttaattgaaatcagagaacctcctagaattttgaatatgaatccatatcagagccttaaaggtgtataatgctagtattatagacatatatttttctttgactatattgaagaaatcataagttcaaacccaaagaaatgcacaattctaaaactatagcaataattattattaatagtccaccaagagcatcctgatatttatggctgcctgtgctccctggctcctgagcacttctgttttagcagacacaacttaagaaattaatcagtaggttaggatttttctatgtgcttctctcactgggtaactggccataaaaacatggacattcttaaattcccttggggcttgtctttctccatttgtgaaatgggacaaatacaacttcattttgtctttaaagtaatgattaaacaaaatgaaaacgaagtggctattgtacaaagaatctctctcagtataaagtgtctttattagcaggcctgttttgagggttaaaaaaaaaaaagcattatgatgctgagaaatccaaggtccttggtccaaatcccaggcccattgcatcttttattatttgttccaatcatctgtgtaagtcctttcttatctcagaacttccatcctctccattgttcactgaagtgagtaaaatctacttttatctcatatttgtgaaaatcaagtaaaaaatatgaatagaagcatgttgtaaaaggcaatgagcccacttacctaaatgattgttgctgttactttagttgtttttgttgatatcattattattattattgctgaaaaataaaatggtgaagtcatcctggatctggaagtttgggagatactttgcatccatctgaggaggatatagcaacagtgttcaggtaaaaaataattacaactgcataaaaatatctctttaaatattaattttgaaatttatgttcttacttgttcatcttttataaaatctctcttgaatgattgtacttattaaacaaataaataagtgaatgaatgattctacatgctgcttaaatgtttttaattactctattattttgatcagtgttttgcctacattcacttaacctgtatacattttacccatataaaaatgtggcttgatggtattcccagctgactggataaaatgaaaaagacaaacaatatcaagtattgatgagccttccaatgtcttacatgctgtttgtggaatgtaaattgatacagatcctttggaaattggggaatgtttgctacaggtgaacatatgaattcaccaaaaactagtaattctactacaaggattaaatatcccctcagaaatgcatatatttgtacaccatacaagaatgttcatagaagatttattccaatagccagaaacctgaggctactctgacacttttcaacagtttcttggataaagaaattgtggtatattcatacaatggtaaactatgtagtgatgacactgaacgtactacaactatccaatgacatgggtgaatttcacaaacataatgttgaacagaagtacccaatcataagaatatataacatgtgtttccatttgcatgaagttcaaaagcaggcaaaatgacctcatggtgtgagaattcagggttgcggttacctttggaaacatgggctgtgatagtgaccagaagccatcataagcatagcttttgggacattagcacctctgtcttgattgacgtcttggcaatttatgaatgtgatctccatgtgtgagaattttccaagctttatgcttaatttgcatgacttgttttggatcccgatctcaagactctaagaatgtctatgactagttaaccagtttggtaaaatgtttttgaacttaaggaaaatttatttcctttgttttcagaattagattggcattttggtgacttattgctgaaagaatgactctatattcttagcctatttgtcttcaggacaaactggagttagaagccccttaacaaatggtgattatgacatctaaactttggcggcagaaccacgtaggtccttagttaggcgatgtatctgatataactcagttaactgagggaaggccagttctgtggccatgcagggctcacgttccttgtgacaggcaagtgatctgtatgaagcagccaggatggacgttatttctcatgcagttatgtggggactaaaagctgatgtggccctgtgccaagtcctttaaaaacctacataatggaaatccattggcaaagtctttactactctaaaatggactctcacctccaaatgaaagtggctggaagcatcacactgcctctgtccaaagcagtgtaagatgcaccagcttgactctgagctggaagcagaagtcaggcatgactctatatttgcactgacatcagttctaccactaaagtatctgaccagtggctggtgtttgttatctctgtggggcctaacatctccaccataaggcaagattcatctcaacttctgggcagtgccctaccaaactcgacctggaaattgattgcctctgtgcagttgatacctgcacttccgggctcagtgacagggtcgactcgcatcatggcccacaaagctccttgtgcaaagagctctccagtaatctggttgatcttgatcttgtttctaccagttggtagttttgctcaagtgctttcagaagcttgaatggcctgataagttggtctttgtgtagaaaaaaaaaacgcaaaaaactaggagacaacttgttctcacaaatcatgtttcaaggagctatttttattccaagatatgagaagcagtcattctgacatgttttattgtctggtggctaaagtcagattcttacattaaaagtaagaactaaaaaactttaatgttatttgagtatgtagagaccacccttgtcaacattggcatgttatagaagaaggaactaagaccaagacacttgctctgtcactatctccattactatgaaccctcaaatggtgcctgtccttcttgttttattttcctatccctcttttctcattcttactcccctctgcatttcccttgtcactcttcactttatagccaaagagacacagaaagagtgtaatgtaaatgtggagggtatacatacaattttcttctattgtgtcttttaatcagcatctctttcaactcatactattctcagtttatcatctcatttttttttaatttggacactttcagtatggtcttatcattaagagacataaaggtttcaatagccagtggtgatttttaggatttcacagctcatatttttggcttttgagtctcaaaaataaaacaatatggaaagtgcccaaatcagcagtataagccctggctgcaaaattatacccatattcaaattacagtgttggtagccagattctttttcccttagaaaagacatttttaacaatagttttcaatgacagcaaacagtcacttatgtgtaacagaaaacataacctaaaaacaaagccttgagaaattgacacttactttagaatatctttttatattaatggtcctagtgccaagctggtagatttaagctaaattctttagaaagcattcccagcacaaatgtagccagggaactcttctacaatttgtaaattttgctggaggataaacagtggaagtgggaataaattgaatttaaagtctcaactaaacagtcgtaccttgtatgtgtgtctgtgtgtgtcaaacttaaatgcagcttgctcagatccacagagcacacaagagcaagtcttctgaatttcagaactgaccagaggcagaatgaactttaaatctggcatgttacatttttcagtgtctccatctgaagaatatgcaaacctccagttaaaaaaaatttatgtattattccattcatatagatttagggtatcaagtttttaagtactgtaattgtttgaccaccatggaaaaaatgatagttttaattctttccaaagctgtagtttgtgcatctgtggacactccttcaatattttaggagaaggtactaggcatatttaaataatactatattattactcactttgtcaacaaaatttggtggttgttccaaagtgccatatgaagccacatgagatttctctctatgggctaaaaacctggcatcccatcaagatgatgctgtttacacattcgatcatcatttactttgtgaaggcagaaggaaaattttcaattaatttttaaaaatttatgtttaacataaattcataatttcttacatatatgttttcttaaccgaacaatttcccttttcttttctttcctttttttctcttttattttctttatcttctcttctctttttcttttctttctttttttttttttttttttgagacagagtctcgctctatcacccaggctagagtgcggtggcacaatcttggttcactgcaacctccacctccctggatcaaacaattcccctgcctcagcctcctcagttgctgggattacaggcacatgcctccacacccggctaatttttttgtatttttagtagagttggggtttcaccatgttggtcggactggtctcgagctcctgaccgcaggcaatccgcccgtcttggcctcccaaagtgttgggattacaggcgtgagccaccacgccaggcctgaacaatttcttagtaagaggcatatcaaaccatttacatttagaaaataaatgccaaatgccaggtgaacagctttttgccatgtgtcattcagttttagaatttctgctcactttgattgtaccatgaaacctacacttagatggagcagaaaacttcaatagggctaaggcatgtgagcaagaagtgcttttaaaacttccactgagggcattctctactttggggattaaggaaagttttacattttaccgattatggatggactctcaagttgaaatctaagtgaagtggttccattaatccaatttatcactgtgataatttaatatactctatggattggtgatcagggcagccgactagttttctctcctttaacctggcttagtttcctcatagaagagacattttaaatgtaataagccttggctcttgcctagcgagttttttcttccattattctttatactggaagagtagctggtttcaaagacttaagtttcccaaatcccctacttgatgttttcagggcttctcccacatccttggtctttaccattttggtatatgtttgcccgaatcccaactgccagagagcttacttctttgcctgaggacttgccctggatcccgaagcctgtttgcccatgcaggaggaaggctggaagtcccaggaaattaatgatcctttggagcaggatttagtcaatgactgaagaagtcagtgtataaaaaccccagctctctctcccttggggaagctaatccagatgcacgtgttccacaggcttccagagttccccagtaagactgagctccagttgtccacagtgatgacttgcttgacaaagcacccctgttcattatcttcccttgctagtgtgacttcccacctctcctactagtatttcctaaaatcacctctgaaacaatttcttcttgaatctttgtctcaaggtctacatctgagtctacatctggggaagttctgaataatttgtaatagaaacatctttggctttactattcccccgaaaaaaactaaataagccacttctcatccccaattatgcaggggctatgtctccactttaaggcatattttctaggtattttttgtggcatatttttgtcttgaaaaatctgccaaaatatatataaaatgacagctcactttaatcatgcttaatgaacacttgctctgaagctctggctagcagccagctgatacctggatgctccaaacttcagaagttgtacagctcagcggctctggtaaattcaattcaatcttgaaattaaaatgttgcagagacagtttctgatattgttttccagaaaattggccttaatagagtaaaaataacattcatatttaatcttctttccttttcctctaagtaatttaaggaaaagttaacttagtttaccaaggcccaaggcaatgctcagctatattaaaataaaatataataaagccttcttaaaatacatttttctgaattctatctcaaatctataaaatcaggacctttgaaattgaggaattaatgttttacaattccccaaaaataatttttatacactctcaggttatattgccttggtgcttaatagttgttttttttttttcacttttcctttcttctaatctcatagttaagttgaatcagattgccctattcttttggcaatctaaaggaaacatatttgcatgtacaccctgtagaacagtatttacttaagtctaggtttaatagaaaataataagtctaataagaagcccaagttcctataataaaaatgaaacaataaatgcatagaaatatgaggaagaaattacacccattaaatgcacctagcctgatgagtgataggatggctgcttattcaagttggaaattttacacatgatcgaagctttatttagtctaatggaatgtgcttcctgaatctggcttctaactaagccagggcacaatagcaagtattatgtgattggactgagctcattcccttctctgagtcattgtgactcagtcttgactgcctctttctctcaggtagcctatcaccttacttttcccctctggtttagaaattcattcagaatgttacagaaaccaacttgactatccttatacatcatgggttaccgctcccgtctttctctaagaacttctggaatcacttggaatatttagccttattttacagtttagaaaacataagctcagtgatttatggagataaaattcacagaaagtgtcccactagtggccaagataagcctgtctcactgctagaggatcacatgggtggatgaatgccatgctaattacaccagcaaagtagagatgactccaaaatattttttaggataatttaatatttgtaattctcaaaaaacaatattaaatatataatctttagaggtttctgaacactcatatatgtccttacatttattagtctttattttgacatatttagagaggtagggatgtatcaaaatcaaattgtaacttgtggcttccgaatgttcttaatccaaacatttcctgtcttcatgtattgcttagccactgagcataaacccataagatatagtacaaggaaagcattgtcaggatgctcatatatcctggaaataattttggttttcccactggtcaccctgggttgtccatgcaatcatccaagtcaatgctaaagtttcaaattgttttgaggatctgaattaaggaaacttaatattagaagaaatatactccattcccagacaggctctcaaggctaacacatttctaatgcagatgtaaaggttatttattggtcaagagtattataaagtggcctatctactatagcttttagactttccaggaaagtgtcaaatcaccctgcctttgttcaaatactctgtttaggtcttgcctttctaagacttctctttatatactgcatctctgagtgtgtccctacacaacaaggagatgttaggctcttaccatcaatggaagaagaatcccatgtttctctcaagtcatcttcctccaaaattcaatatgagttcattctgggccactgatctgactatgaattctgggaagtgtgcagttatcagatagtgatctagaattcatacaacctacaaaagacattgtttataataacttaaaccacatcacaagtttcccctcccctggagactgtagtgaaagcagagcatcattaggcaagacacctgatagaaacattagatgttggttctggttccccaacaataaaaaattcacaaggactttagccttgctgaccacattgctagagttgttgacattgtagggctttgtggatagtccaggctgacttccatctatttcccacctacagtccttgacatcttccatgccactgtcacattgctgagttcagggtgagaactccctcttcttccctctagcattaacttgtaatcatattgatcaggtctctgacaaagaagtcttggtgacttagtttggtataattcttttagcataaccaccacatttaactcatttttcctttttttttttatagtctccagttctgtttggaaatacaggttggcttctcttggagatagttctaaagatgatatgagtaaaaatacacagttggacacattgaacaattcccttgcagcttaaaatgtctggactaagctgagtttcttctgaatctagaatgtaagcactggggtagcagattgggaagaatataaattcattgaaatgtaagttaccacatgaaaaattccactctccaaacaaccaatttgctgagagcaaatctggctgccacttgcatatgaacattgattgttcaagaactatctagggctcttaaaatgggaaagctatttttttcttaccctgtactatctgaaaatcactacttgatatggtttggccatgccccccacccaaatttcatcttgaattgtagctcccataattcccacatgttgtgggaggagcccagtgggagataattgaatcatcagggtggtttcactcatactgttctcgtgatagtgaataagtctcacaagatctgatggctttataagaaggagtttccctgcacaagctctctctttgcctgctgccatccatgtaagacatgacttgctcctccttgccttctgccacgttgtgaggtctccccagcaacgtggaactgtaagtccattaaacttctttcttttgtaaattgcccagccttgggtatgtgtttatcagcagcatgaaaaaggactaatacactactaaatcaaagcaatttaattgtactttattttttacaaagtataagtaatttcaccactgtctttttacttcttgttttccactgtgatgaaacctgtatataatttaaacaagcaaataattaagtaaataagtcaacaaataaatctcaaaaaacagaattttcagtggtccaaagaagcaatataaattatataatacaataaatacacacaaacacagcatctttaatacaattcactgactttctctataactttaatagataatagtacagttcagttgaatgtagattaatttagtactttggatttgtgaactgttctcaatcatttaccattttatagataaatgagaagttgtattagtcagcatcgctgagatatcaaatgatcctcatattttagtggcttaaatcacaaatatttatgccttgctcacatttcatgtcaactaacttgggactgtcccattgtatttcttctcattccggcactgacggtcaaggagaagtgctcttttggctttgctattctcttggaaaaggaaaaaagatgaaagccatttgtgcagtatcctctaatgcttctatttacacatcaagacggtttatattccattgaacaaagcaagtcatgacaaggttcaaaatgaagggggcagcaaagcacattcctcccttggaaaagcacagaaatcacatagcaacagatgatggtacatattcttacaggccaaggaggcatgaataattgagaacagcaatataatctaatacaaaattatttttcttaaatgccattattttttcctggatatagaaaaatgaagaagatgaagcttcattactgatataccaattttacttgattctgggtttatatttgtaaacaagagtggaagatttcatgtgagcttgaatatggatgtagtcaggggcatgagcctgatgaattaaataggtcagcatatataacataatacaaaggaagacagaaaaccatcctgcagtttatgttattctttccattcgtgttatataaaacactggaagttaagatgcactagaagtttctgtttcaaaaatgacagtgggctgtacaatcacaacataaattgttatatgtatcaattagtaatgactgtgtaccaatcctacccaaatctcagtggcttaaaataataagatttgttattttcttaagtagatggaaagatcatgagggttttattctcttagctgtattcactcatacatctgcagtcaggtttttccacctatttggaatgcagctggatgcatgtagactgacctagacagattacagctgaggcaattggtttgtcatccatatctctcattcttcaataggacagcctaggctcattcacatagcagtgacagggttccaagaaacagagcagaagttgcgaggtgtcttgaggcctggcttggaacttgcacaacagcacttttgcaatcatagcaattcacaagatgagcccaaattcaaggaaaagggaaataggccctaccacttgaaggtagaagccaagatatcatattgcaaaagataatctttttagattaaaaaatgggttattttagaatagatttatatatactgaaaaattatgaagataatagggaaccatataccccaagcccaacttttcctattattaactccttatattaccatcgtgcatttgtcacaactaaagaaccaatataaatgtattatcactagtaaattccatacttttttcaaattttctgaatttttatctaatgttacttttctccaaggatcctatctagaatacactacattcagtcattatatcttgttaggctcctattggttgtgacaatttctcagccttttctaagttttgatgacattgacagtttttgttagagcactgctcaggtattttgtagaagttgtttttttcttgtttgtttttggagatggagtctcactctgtcacccaggctggagtgcagtggtacaatctcggctcactgtaacctccatttcccgggttcaagcgattctcccacctcagcttcccgagtagctgggattacaggcacccgccaccatgcctgactattttttgtatttttagtacagatggggtttcatcatgttggccaggctggtctcaaactcccgacctcaggtgatccgcctgcctcagcctcccaaagtgctaggattacagacatgagccaccgcacctggccagaatgtttttcaactggaatttgtctaattcttttctcataaacagattgaggttatgagtttttgaaaagaaaaccacagaggttaactgctgctcttattacattaaaacaagagtacatattattggcatgccatcacttttgatattgaccttgtccacctgagcagcataattttgtcagctttctctgctgtaaagatgttctcctctcctttgccatattataattgttggaagggagtcaccttgtacaaaacacaaataagagtaaaaacttatgttctgcctccttgaaagtgaagtagccaaataaattatttgtaattcatctgcatgggagaattgtctattttcctatttatttatttatttacttgcttgtttaattatttatttatatcagtatagacatacaagtatttattttctactttgggtcataatttcacagtattaatattattttcattattttctttctcaagttgttccagctttggccattgggaatgctccatttcttcttgtgtccctttgtcatacttctattattgtgggggatttttaaaaacttttattttttagcattcccttgatttttggcattacagagccttcagcctcctcttttatattttctgagttctagaatcaatcatttcttcaaggaaaacttgttccttgtattagagaatagtattacaaactaaaagctgggtcctgggtttggtcattactgctggagtgttgttgctgctaggccctttcagccgacagaatgatcaaatgcatgagtgtatactaacctgtgcatatccttgtatctctgaatatttccatatgcaaccctgtgtacctacattaagctaaacatgagttcttactcatatctccaactgcagattatgatctggatcatttcagcttcctctctttgctatttgtaacctcatactccaacactaagaaacctgtcactttccatctgctatcaattcacttgattgttcaatttcaatataaatgtatagtggtttcagaattgtcaacttgaactcttatgggaaacagctttatcaagtagaatacggtacttatgtgcagttcttttcacctttactgtcatttccaaaattatttaggtcgacaccttttctcctatccccttcagttagattgtttcatacatttgtaatatggttagattcttttgccgcattctaaattccattctggaatttccttaactcctaatttttttatttgcatgcactaaggttcactctttgtgttgcaaagatctatgagttttaacgtatgcagtgttatatgtccacaattactctatcatacagaatagttttacctttctaaacaaacaaacaaacaaacagaaacacattttcacctattcaaccctcttcctactcagatgacccacaaccaccagcctgtttcctgtctttatagttttgccttttctagaatgtcatgttaatagaagcataaatttatagcctacttagcctggtttctttcacttagcaataggcttttaaagatatatccatgattttgcctggcttgataactcactctttttatccctgagtattagtccatcctatgaaggatgcagaacagcttgtttgtccattcgtctattgaaggacattcgtattgctttctatttaggaagattaggaataaagctgttataaacattcgcatgcaggcttttaagtggacatgttttcaaatcaactggataaaatacctaggagcacaattagtggtaagaaactgtcaaacagttttccaaagtggttgtaccagtttgcattcatatcaccaatgaatgagaaatcctgctgctccacaatcttacagtaattggtattgtcagttattggattttagccattcaaattagtgtgtagtgctctctcattgttatttttatttgcatttctctaatgatcatttttataatcaatctactgcatcatacatagcaatcattaataaaaataatttttgattaattcataaattgtatgaatggttattctacatatttttagaatataaattgttcatcatgtaatggttggctagtttaactttggggaaatctgaagccctagggactatatatttatgttgtttacttttacatcctcagcacctgatacatattaagtgctcaataagtttccttccacgaatgaatagacaagcttaaattcatccctactaaaatatttaaaaaataaaaatattaattattgtgccaagagactcagaagttcttcaggatacttctcagttttttaaggtgttttcttttttcctcttattcttgatcatcgttttcctagaccttgatggtaacacttggaaaaatggaaaagtataaaaaaagtgtatctacttcctactctcttttagtactctttagctgatataaaagcactaacttacattaccatatcggcttattgctggaagtctccatgagaaacgggagattctaggggaaggcagttcagtgatggggagacagggagagagagagttctttagtttttatgtgtagttttggtatcttcttttctgtatgcatttaattacttcacactgaatgcaaagtaaaatttttttgaagacaaacattccacatgtattttcatgcctttattcttgttctagcctgaaagtgcatacttctgtgtaaagttcattttaccatttcctgtcatagtttatatccacacgcacaactgacttggatgtttttattgaagtgaatcattaatttgccagtaaaccactattaaactttattaagaaatcagttatttctcaatcatctatttaaataattgccccttttaattaaggttttgaaccagcgtggcctaattcaacggcattatccacacaagtagtgtacttgaaaaccaacaatatcaataacaacagaaataatttaagattgtgtttcaggaaagactctcttgaactgtgtgtttcctctgatttcataccataacaatcatcaacatagaagacttctgtaaccaaagatgtgggtttttatttctctacaagccaagcagtggacaccagctgagtgtcccccagttcaattccaatgctatctacctagagataacatcagatgccacagagtgggggctttgtctccaagcttgccttcctccaactctttaaaaatttttatttttaagttccaaggtacatgtctaggatgtgtaggtttgttacataggtaaatgtgtgccatggtggtttgctgcacctatcaacccatcacctaggtattaagcccagcatgcattagctatttttcctaaataggaaaatatttaggaaaaatatttccccaccccctgacaggccccagtgtgtgttgttcccccagccctgtgtccgtgcattctcattgttcagctaccactcataagtgagaacatgcagtgtttgtgtttctgttcctgagttagtttgctgaggataacggcttccagcaccatccacgtccctgcaaaaaacatgatctcattcctttttatctgcccctcacctctttagacaccagtttcacatctaggcctttgagacttctgactggctgacttcaagttgaagttcccacaaccctctctttgggttggattaatttgttagagaagctcacagaactcagggaaacatatttactggcttattataaacaacattataaaggacacagatgaagagatgagtaaggagaggtaagggaaaaggggtatggagcttccatgtcctccctgggcagccacctttgtccagccatccagaagctctcagaactctgtccttttgggttcttatggaggcttcattacataggcataattgacaaccatgtagaaacatgattggacaaaaagggcatgatttaaacccagcaaagcttgtctgttcagacttctttggcctctttgggtagcattccttcctctagggtctggggaagaactctggctggaacgagggtcttttgactcacaatcagattagagtcctgccttgggcaggtgaaagagggacagaagaaggtcagagagaaagagacagattttgtttcctgaggcctgaagtgccccaacattataatgaaagaccatggcaggggttatgggagttataagccaggaaccatggacacacacaaatatataaaatatcacaaattgactgtctcagaggaaaactgtcttgactaattcttttctttgaaaaagctgttacttttctgtaataaaattgtttaaatttccaccactatggaattccatggaaactgaaataccaagtaatactggtgcacactggttttgtgaagacaagggcagctttcttgtcttcctgttatgaactcagggttagaagacaaggctttgctcctggaatgtcagtttctttatttcaaaatgagaataagaagactcattttgtttcgtactctcttcccctgcccccattttattaaggtataattaacaaataaaaaatgtatacatgtattgtgtacaacatgatgtttgatgttttgatatatgaatacatagtaaaatgattaagtcaaactaattaacatattcatcctctcaaatacttatttttttttctggttaaatctacttttttttagcaattttcaagcaaagaacacattattattaactgtagtcaccatgctctacaatagatctccagaacttattaatcctgagtataaaacatactgcatattaactatatttatactttgacttcagctacaccaattgtcagcattgataactgaaactttgtacccttttacttgtttcatttctttctaagtggtataaagtcagccttaattgtggacccataagacaggtaccacttgtggagctgaaataagttatatgatttttatggtggcaaagcaagtaatatagggagcaaaaggaattttccatggtttgctgatgactgagtgcatgaaaagataaatttaatctgatggctattaatacagacaactctgggtagaccaaatctaataaaccctaagcaaatatttaatcaatatattgtggtttgaataaaggagactgaaaatgctttagcccagggttcggtgtaatcatgctgaccgcagttctgagagctggttgctgtctaaggagaatgatgatcagtgtttcccagacgcatcagtctaacactaaatccacctatttgaccagccctattaaaaccgtatcaatcactggaaactgtattcccagactgtgctatttaaattgctacttaaaaatcagcattttccattatgctaaacatctcaacccattcgttctgcaaagcaatgttttatttttaaacactggtttattacacatcgaggaatcagtctatacataactctagagaacattcttctttcccctttaattttagaagcaaaaagaaccaggtcattgtggtctattgttgtatcatacccattattcagtctcctcttgtgagaaaattataaccctcaacttgctgccatgcgaattacagtgacttcccttggagggaggacttccttagctcagtaacatcactctgcccatgtgacttgctttcatcagtggaatgtgaccaaagtaatgcatgccatatctatagttttaagtcatttatgattcaatcatctccatttttcttttgctatcagaagggtatgtcccaaagaagggccgattctacatcttggattctgggatgaagaatgtgtatcaagcagatttgtagttaatgtgcagcttccatagcccaaatatgaggcaaagaagaaagtaattgatgtaaaccttcgtagctcggagttgctgggttttggaagctgttggttgttgcagcataatgtagtaaatattggcttacacatttagcaaggattctgaacacagtgagaaaaaaacattttcttagaaacttggtgatagccaagatctttcttaagctagatttatatttatctatttattatttttgcaaacatacaaaacatttctacattgtgaaacttcttcctttaaaaatactacttatgacacataggttgatacttcatttttaaatatcaaggttgtgttatattctctaccaggtccttataaatatttccaagtcttaaaataccccactgagaagttactttggagctctattttacagagaaggaagttgtgactcggaggtgacattctacaagccacaaagacacggtaaggatttcaacccatgccacagcccccatccatgcacattttatcacctctgtcacttcataatctttcaaattaaatgatgttttaattattcagccaacccccaccaactcctccagagctccatttgaaggataaattagtctttaacagtttttttcaatgccaacattctgatggtgtatcaccttttccctatttatcttagacatggaacatttccatattccactgtaatcatgcagatttcaaggatgtaatttagaaaattagacaaaaattttagtaggatggagttttctttagtttccttttattaatgtttgcatttctgttatttctaataacaaaagtaattcacttttttcttgtagaaaattgaaaaatgcatcaaagctgtaaaactaaagagtgccgtgattgatgcatttctctgagtataatttatatttccatagaaactttgcataaattcaaaaaactatccacaacattgatctaaaacttttaatcaatagattcatttattagccatttgttcaatacttactagatagctagtcagtgctagactgggccttcggatacagtggatccaacagacaattatctacactcaacatcacttacattctacgtggaagacagataatgaactggctttaaaaagggacaatcaaaactattaaatactggggcatatcccctaaagaaatttatcagggtgaagacaaagatgactcttttggatagagtgagtaagaaaagtaacagttgggttgaattttaaaggataagaatgaatcagccatgccaggaaccggggaaagacctcccagtcagagaaaagagagagcagaaggcactgacccaggaaagagtgacttctccagcagggacaaaaggaggccagcattgggttgaagtacagtgagtaagggtgggagcagtcttgggtggtggggagatggatatgaaagtggagttcatctcaggtggattcttgtaggacgtaactaggagtttggattattttgggggtcagggagaaagggaagccatcagagcgattacatgaccaaagctttagcatgttcacttcagatgctgcatggcaaaatgcaccgagaaggccagagtggagacttctattttatttacatattttgtctgtattgatagcacagtttcatcttggaaacaatgacagtaacttattttgcaacaatttagctaatagaaaagacagaaaagggccagacatggtggtccactcctgtaatcctagcactttgggaggccaaggtgggcagatcacccgaggtcgggagttggagatcagcctgaccaacatggcaaaactccatctctactaaaaataaaaaaactagcccggtgtggtggcaggagcctgtaatcccagctactcaggaggctgaggcaggagaaatgaacctgggaggcagaggttgcagtgagccaagatggtgccattgcactccagcctgggtgacaagaacaaaactccttcacacacacacacacacacacacacacacacacacacacacacacacgacagaaaaggggaaattgcaactgggcatttattacaggattagctactctcatctattacttggatggagagaaataaatagatttcaggtttgttttgggaagagaatccatagaattcactggtaaactagatgtggagtataagaaaagagccctcaagcatagttagcagttttctaactacatcgactgtgaaagacgtggaagtatttttctcagatggggaagatgtggacaaaaaaaagcagtgagagaagagaatgttggacactgaaggtttttgagggacaaatagagatatcaggaatcaattgtgaggtccaaatgttaggtattggctaaagacataaatttgaagaactgagcatttagaccaggggttagcaaacccttgcatgtgggccaaatctaatcactgtttgttgccttatggctgtgtgaatgctttccatgtttaaatggttggaaaaaaattaaaacaaaaaaattatgatatatgaaaattatatgaaacttaaattttagtgtccataaatgaagctttattggaacacagccaatatatttgttgatatattatctatggctacttttatactacaaaggcagagtagagtaactgtgatagagaccatatgccctgcaaagtcaaaaatatttactatacagctatttatagaaagactttgcctattattaatttagatgatattaaacctaagggattggactgtacaaatcctagaaagttttgctttgtctttgcgtccagcaagcctgatgtcctggaaaaatgtgggaacctggagagaggaccatccattcacttgcctgctgtgagtctcacttgtggactctctaaggaaggaacaacatcagaagagaatgataaatgaccaaagccagacagggtccctgcactgcaagctccaaattaactctagagtgaacagatctgcaaagttaaaaaaaaaaaaaagaaagaaagaaaacatgggaaaagggccttctgtttattttttttccccttattaatttaccacaaccactgtcccactgtcaagtatcccagtttctgtctgagaagagcagctggcagggacagtgatcaaaaagcagttggaaaaccccaagaaattatggaaccctcataaaagaatcaaaggacaatgtttttcaaaccacttgaaaaactaaagcctccattctggtcataccattcattgtgtttctcgtggtgtgttaactgcaatgaaggacatgggcagttgtggagattggggtagaatgttttcagtgaaataccagcctcctaagtgacaagattcacaggagcctgtgctttagcatgaaaataatgtcctcaatgtatcttaactgagaaccagacaagtaattttttagtagaacttcaaacaattgtttacagtagagtataaaacatactgcatattaattatattcacactcctacttgagctacaccagttgtcagcgttgactatatattttctacatattttataattaataataataattctttttgggaaggtttagccaatagaagggagatggggtggtggttaagtacctcaggattgcaacttgagagtgaatggcaaggaaaccacttaatctttaaaacacacacacacacacacacacactgtatttcaaaatcttcactaggtatttgaggtggttttttactagtgttttgaaatagtgactgtgactcaagaaaggctagaagatgccacatccattcatatttttctgctaggattcttatggcttctagttgtggtgaaccaacctcattctaccagtcatacaagcttactatgacttgtcagcttttccattccctggtcacttaagttaagtgtatccatttatttacttctctccaatattgccaaaatctacagtgaggaaaaacattatctgagccattatatgttgaaccattattaggaaatatttggcatttatgtataaatagtttcagttgtagaacaaaaagcctctattaaaatttctggaacttctttttcagaaaattttatcatttaaataggctcataaaattattttgtcatgacatatatcacaatgtaatataatctatttgtatctgtgtgcatgtacatacacacaccatatatcagacattgttttataaatttattatagcaggtggctattcaataaattttggaagaaagaaatacagacctatccatacatctggagtagctttgaccttgaccaacttaacttctactctccatgatcatgtagtgttctatttagaggatcccagtgttgttattagagcaccttgcatataccaagtgctcaataaatgatggctgaatgcagaataaaatcattactgacactttcttttttaatccccaagggcatggcacaagtttcaataaataccaggtgatttctactgaaaataattttactgtataatttacaaagtgcttaagtatccactacctcatttagtccttactacagttctacaagctaagtagttttatccacattttaaggtgagaaaattacgcccagagaagttagatgacttgctcagggtcatcaacaaataagacatcatgaagggaatgaattcaaatttggtgcctttgcatcatccactttttgtgtagagttgactggtcaaaagtctgtctctcatttacaagtcaaggtgccaggcatacagtcttgaatgttgagcctcaggcctccaatgagcaatttgtattataaccaaatagagttgtttggccattttaggtcagcatttatggtatttacacctatgaacctacccccttttctctttacaaacttataggttgacaatttttttgtgtgaaaattcactgaaatgagattatctcatttttgcctcttgatttttggtgtgctttcttgttcttgtttaaaacatttggttttgttttgatattaagcttcagtgtcagtcctgtgaagacgtaagatagaagctatacatgtacaacaatataatccatacttccaaagctacaataagcagtaacacttttggagcgaaaaatcttggtaaagcaaacaacacatgttttggggtttgagatctaggtttgaggcctagccacagcactctcatgttctttttgacccaagccaaatcactcagcctgctgagatctcagttgttttttttcatcctggacaatgggcatgatgctgactgtccctctgggtggttctgaggatcttgggaggatggatataagtgcaacttaaactctggagccctttacaactgcaaggcagcattattcactcaaacataaaaataggtcattaagcatcatcaaagggaaaagtaaatgttcagggatcatctctgctgcactgttgctggggaaagaggctctttgtccctttaagagctttcagacacatctctagtcacatcctaaaagccttcctagttgtgtagcttaggtgcatccggtagcacagccgtgttctgatcttcctggcagatgtcataatttactgtcacccccatgcaggaatgcagggcgaggggcccccatgccggctctgtgatccattgcctgacaagtcctgagtgtcaacctcaggcaggcccagcggaggtggaacaccatttacctgatagtgcctgtgataaagtgggcaattagacgcacttggaaaagcctggctggaaactggctggcatttacacaacattacagccaagtcaggcttcataaaagttaatggagaaaaatgaagtccttcaagatctaccttgctctctgaggaagtcaggaacacaggactctgtagctttatttctttttgtgtctctcccaccttttcactctatttcccccagacagggtaatatattctcattggagatgggagtaaaggaaagcgaattgagagttgaggtcttaagtgtttgatctcagaggcatgttatttctttagtcttcaatcctctctcttcccctcctctctgtctctctctcacacacacacatgcacacacacacacacactctatacttctatagagtatacacactctatatttctctgtctttctgtctctgtctctctctcacacacatgtgcgagcacacacacacacaatcacagtgctaggatttaacttggcaccttggcttacaatttgcctctcactggagtttctggagtttggtgccagttcaagagcatgatctgtttgacatgaattctacagccctctcttcatttcctcctaactggatagcttcagtttgccgatgattaatgagtctggaaggtgagcgacagttatcttaagggctctcaaaagtttatttcagagactagccaaactctcctgctacattaactgcagcgaagtttcctgtttaacagcccatggaaaataactgcctgacccccgccccccccccaaaccaagctgccatgagcgcagctctgtttattggccaacagtgtgcatgttctctctatcgcttcctttcaggcagacgaacattttacctatgagaagtaggaagtccattgtgaggctggtccaatactggacctcatttggatgtggaggatttctgaaattggaaagtcaggactgatctggaaaatgtgcttacagatagtggaacaggaaaatgattcgctccccaaggccagttcctcctcctctgctgggtggaaaaggtgggaggaagggacagggtgttctgcctgtgattggaattcccctgtagagtcatagaggatgagcaagcctttggttttcctttttcatattttattttgcacctacaataataagcatgcagagaggagacagagaggcctaaatgagtttttttcctttctaaataatgaccagctctgtatcaatctgaaggctactgagggatgctggtggctggatggcggggcctatttagggttttggcctgattaaaaggtagtcccagggacatgcaggcctaccaggtgcacactggtgccagccacttcagtggggtgggggaaattactgggcctgctgtctcaagtttgagaggacatctgagattcgggtccgatagggtcacaatgtcttcaacacgaataaataggcagttgtaggttggggaagggaaagctaaagtggaaaataaataacttaagacaccagacaagttctggagactgaggtagagagatgatggagtgctcttcacccatgtacacttcagcctctcatgtcatcgtggtgatgctgccaaaatagacccaagttacattttccttatgatctcattttactgggcttgaagcctacctcactcaacatctttggagggtacattgaaacgagctgtttgtaagacagtattaaaggaagtggcgttatatgtgtgtgtatttgtgtcatatacatatatgaaacaaagatatttgaatatatacatgtagatagtttcccaaaaacccatctcccttggggaatagtctcaccttcagggagaggtgctagagagggtcagagattctcctgctctatgccataagaccaaagatagattgtaattatgatcccaattctttgcctctcctctatccgtgctatttgaagcccctcccatcaagaggtgaggtctgggtctatttctctactctttgattattgattggccttgtgacacagctgggcctatagtggaggttacactgtgccagttttgtctaagccccgagatgtcttgtgtgtttcctcttgcccactcaatccctgtaagttgcagccatgacactatgccctgaatagccttctgtaggatgagacatgagggacagagccatgtcatcccagtggttttagcgaaggctgtcctaaatcagccaaaggctaactgacctctgaaatatgaatgggcccagcagagcccaggccaaatcaccaaactacagacacaaaaactcaataaatcttattgctttgagccagagtttggggctggtttgttatgtgtgttatttattatcacagcaataaataacagatgcagttgcctctgcttactgttccaagtcttactttttttttttttttggtcactcatttacatctttttacatctttgctagtgagccagtctgatagtggcctttatcttacatgatttttcagtccttcatttggctttaccttcattctctttctttcctcactcccactcactttgcataagaacccattttgtttttctatggcactcttaagttaataccagacagccctgacattagtagggaatttttctcagttcctctcaagcaacttctacattttgtgttattttgacatttgggagaaagaaacaaacaataaacaactctgtaatgcattgggtaatacatagtgctgtggagaaaaattaagcagcatatgccaaatattgagagttgaggggaagggtgctgagtggggaaaggggtgcttctttttcataaagggtccctaggcaaggcctctctgagaaggaggcatgtgaacaaatactaggtgacttgatccttttctagactatattggagtgggatgaagggtatgtaggtcactcccctggttacctatttcaaggactgatatggagacataaagaatcaccataacttgcccaataaagtgccactcatccatggtcactgtgggaaggaggcagcatttcagggcttgcaattctttacatgcttaatccttctagtatcagaactttaacaagcacctgctggacctgaagtctaaagagctagatttttacatctatgctgccacaagaaaatcatgtaaacttgacaaagtcattattttctctgggttgatttttctcatatggcaagtgaagggttgaattagatgcattttaaagaaactaccaagtctgtcattctgtggttttatgagattatgtagctggtgctacattgagtttttcaggagaaagaaaagaagaaataattgtaataacaatattgccctcctcaccgacccgtataatcttctctaattcttcacaaagatgagagagacagaaagaataatacaagggggtagaaaataatgcatgctttaggaatccaagcaatactttttctcttcctcattgagtctttgtaccttctgtcccaaatccagaaagagctagtctgctttctcatgaaccatcctaaatctatagggcattactcctttaggcatctgccagattctaattctgaaggatgatgtaggatttgggtgttaaagttgctactgtgtccccagttcagggctctgaactgtctcctggtgatggggcacactgctgctgacaattttgggtgagaggttacccatagtgagcctccactcattttctactcaacaaggacctccctggaattcatctgtggtcaaaaagaatcgtggcaaactttggctattgtacatgcaacagaatggcacttcgatgtttgtggagcatggcaagactgcaatcctataaccttactggcctggtagaactattgtcatcgatgatgatcatgcaactaacaagaactgtccaataaagaactgtccatgtggatcaataaaggatccacatgacatgtgaatagagggaggactggctggcaaggaggaatgaggccagaaatggaaaagaatacataagccagaaaaaaaaaaaagccagcttctagaggaagcattgatagccaaagcctgcctgcttgggcctggctcagcacactccctccattcttgatgcaggtgttatcaagattagagcatgctgaactgctggaactgcacagaaaatgtcattcaggagacattgagggagagaaagtggggctgcagcagtcaggaaggggcatagggccttcctgcgtagtcattttcacagcacagtaagaataatagaatgagaaaatatgattttacaagaaaaaatggttaaagaaaaagagacaaaacatcaccatcatgcacactcacaaacacagacacacacacacaaacatgcacaaaacagggtattgactacaaggaatgaatgtttccattctattgccaaaaaggcctgattctctttaactgctgtttaccatttttcattgttttattactattattattttgaaaatactagttaagcaattacctcaaccacttttgaaactgtagtatagtgaagtggttaaaaatgagaattctggagccgaacatcctgaaaccaaaccccagtttgtaccactttctgttttgggtctggatacattagctccatattccttaattttctcatttataaaatgaaagttataacaacttacatgtcatagagtttttatgaagattagataaaattatatgtgtgaagcacatggaaaatcaatgccttgatcatttgttatgaatattttcaactcagatacaatgcagccgtttacagaggtctaataatgaataaatatagtggttggaggttatgagagatttaaaatgtacacataaagccattcctcatttacaaaatagtttaagaggaagaattacatgtaaagaatttaaataggacaattattcaagacaaaatagaaagtaaaatcaaatagaaatattaatgaaatagagaagtgataggttctcatttctttttacaatgtgtaaaaagaaaatatagtttattggaaatcaatattaaggtagaaaagagaatctcctttttatgttgagggagcatttcagaagtcatttagtttaaccttttgtttatgatacaaacctattttatgatttctctgagatcttatcagtcaaggagtgattatgttatatggctcatagttcattcactcaggaagcaatctattccatttttgaagagctattaagaaaagacaaataaaaagctatcaaaggtcacttataggaaagaagaaaaggagtaaagctgttaacttgtgaagagcttaattggagtacctctactgaaagttaggttattcatattaatctctctgctaaaaataattttaaaattctgaataaaatatttttaaaggattaatatgaagtgttaaataactcataagatagaaattgtagagaaagatgcaactcaaaagatagaaaacaaagtttgattttaccataaagacaattgtcaaaactgagaaatgtgaacactggttttgggaactttagccttgaggagaaaaaagagaaataaattaaactcagagccttctaaggctgaggaatcatcaacttcagttaggcgttaaaggattgtaccatcagaacaaaagtgaagaagaaataaggtggaacttagatggatttgccaacaaatttgcaattccttggtgcctctttagaaaaaaagaaaacacacacacacacacacacacacacacacacacagagttaattttaatttagagtagtatcagcattggtagtaacaatgagtagatgaaagaaataatactcattttgactaaagaaggataacattgtcatagccttaaaatacttctaaaaaataattttcaaataaaatgagaaacacaacgtcaaataattccaagtacccacggaaacaaggaactgtgagcaagaaccagcagaaaactgaaaataaaaatgaagagtgaaagaaaagaaaacaaattccaagattgtcacattctagaattagtagacacattatagaacaatctgtttgctagatttaaagatttaaagccacatttgaaaatgtttacagagaatagaaaagtttaagtgatctagcatatttttcaaagtaatatttctatcccattggttactccttttaaaaattaaaaagtgttatttctagaaataaaaaatataataattaaaagtttaaagtataagtttaaatgcatattagatacaatccaagaaagaattagaactgcaagaaacgttagaataaattatttaggatgttgcatggagagacagtggatggaatacagaaggtcaagaggcaaaaaggatagattgagaagaacgaatatacccttaatttgattccataaaggagagaataaaagtataatggagagataatatttgaatagaaaataaataaaaattttctagaactgattaaggacagaatctagagattttaaaaaaagctaataaatctctaaaagggtaaatagaaagacatttacacctaatcattctatcatgaaactgcagaattctaatgaagaagaaaaatcctgaaaatagacaaaagaaaaacagattatctttaaagaaatgactgacagctaacttaatagcaacagtgaatgccaatagcaatggaatggtgactttaatgtgctgaagaaggtaaatgtcatcctgaaaatctatatcccgtgaaagttaccttccatgtgaagaagaaatttagattattttcaggcaaacaaaaagcgagaggatttgccaccagcaaacctacactaaaagaaatagtaaagaatgttcttgaggcagaatcaagttgaatccagagagaagatccaaagtgaacagggaatgaagaagagagaacaaagtgaatatgtgggtaagtctaataaaatgtacaaaataacaataattaaacatgataataaggtattaaagattaagacagaatttaaatccaaaacaacattaacagatttacttgaatgtgataaaaatgagttgaaatgttctaaggaccttgtcttttctaagggaaaattgaagtattgattaattttctactttgatgtatactaatgttttaacttgtatgattttcaaattaatatttaaaaattagaataaaaacattcaaactgaaatattacaagagggaaaggaaatacaatagaatagttagagaaaaataaaaatcaagagggtatattttaaacacaaacgtgttagtaatcattgaaatgcaaatagactgatttaaatgcaaatagactgaataattaaaagtaaagaatattagcttggattaaggaaaattcctgtgaaatccggtacatccataatcactggaagtggggaattcatgttctagtttatgagggtggtgttccctgaagttgtgtagtatacatcctatgtgtccctggagctaacaataaaaataaaacagaagtagaagcttggacaaatatgtattatttgagtgtaaaacaaaggaaaggtagtgttgcaatagtaatactaaacataatagatttaaggcaaaaggtatagtcactttataatgataacaacttcaactcacaagaagatgtaatgattttacatatccatgcacctaatgatagagattcacagcatataaatcaaaaattgatggaaccacaagaagacgtggacaataagagaatcaaaagaatatataggcaaaactacactcatataagaaacttttaacacatctgtttcaggaattgaaagaacaaatgaatcaaaaataaccactcagaattttagcatattatcttgctcagtagttaatagaattgcaaggaaaaatcaatacagtaaaaaagaggctgaaatgcacaaactaggtatttgtattagtctgttcttgcactgctataaagaaataccaggaactgggtaatttataagcaaagaggtttaattggctcacagttctacaggttgtacaggaagcatagcacagcatctgcttttggggaggccttaggaagcttacaatcatggtggaaggcggtgggggagcaggtgtcttacatgataggaggaggagcaagagaagtcggagccaccacacacttaaatgaccagatctcaggagatctcattatcacgaggacagcaccaagtcatgtgggtcccactcccatgatccagtcacctcccaccaggcccctcctccaacattggggattacaattcaacatgaaatgtgggggaggacaaatattcaaatgatatctgcattcattacaaggagttactaaactttcacaaagtagaataaagtagttcaaatgataaaaatagggcagagaagataaacattgccaaaatttggttcattgaaaacacaaaattttaaaacatctagaaaattaattttaagaaaaggaaaaaaaagaaagcccaaataatcaaaatcaggaagacaaggaggccatcacacacataatgcagacattgttaagatattacgaacactcttgcaaataaaatggaaatttcagaaaaaacttgaaaacaatcttagaaaaatataacgtgactcatcttactacttttatatacacttaatgggaacctacagtggtttaaattttagaaacaattgtaaaaggccttaaatatattcatatacttttacttcgtagtctcaattctcggtaagtttgcaaaggaattatgcctaaatgcaaacaataacaacagcgaccttgacatacaaacacattccacatagttacttactcaaaaaagaaaactgggccaaatcaagtgtgaaactattgatgaacagctaaaaaaatggagacaagtgggccaaaacatcgtttttttttaatccacttttttgaaaaatgagaaatctatttttatttcattttgtttatatttgggcatatactataaatgtccagcaacaaagacattaattaaataagtgatagaaatatactatgaaatacaatgaaatctttagagatgattgtgtaaaagtctttttatattttggggactctagcccatttgcataaattatcttaatcctataagaggaaaatacagaaccagtagggaaaaaagaacaagatcatggcaagctgaaaaggcacaaaacttcactaaatcaagtcaggattcaaagagaaaatctagctttatagggaagcagtattaataatagtaaaaccccaatagtccattgtaatgcttgagacaaggcctcacatttcagcaggtagaattattaccaccctggggactcacgaccacaagtccatctgtgatcaaagcaactcagttccaagtttcactggatttggtggtgatgttcctgataggccttatttatcagttctatggtgaccattaaaaaaaaaaaaactctcacacacacaacagaatattttaaaaattgaagttcattttataatcaataagcacacttaatgcaatgctatttttcattattactaggttgatagtttatcttaaagtttaaggcatcttattgtcaaggaaccatagtgtttccagggttcttcagactagctcaggaactgtgcctatgggtgacacctggcattagagttagcacagaggacttaaaagcattggaagggaaaggagaccagaagtgaaactgtagatcataacacaatcgagttattaacaaagattacttccaggtctcaaaagcttgtgctctactatgagagacaggctaagaacagtgacaaaccctagaatatcctccagcaaatactaggaagttggttcgtaagatcactttcccaactgctacgccctctgttggtaggcacagttgatgagtctgacctcacacagagttttgcttctgtctttcaaagtctgcaggttggaaggtgtaaagctgtggagtttcactgccaagttctgtggcacaggctgtatactctaagaatttaaaggcgagatattgaaaaggactaaggaaggattaatgagttagagttggggcttaaagaatttcaataggtaaaaagagggcttttccagggctaataaacatggaacttgagaggggaagaaggaaggtgcatttttggcatagtgtttcttctggagcatttccttattcagctctggaagttctttggctaaactggaattgcaaaggcaagaatctacttggaaataactggaatgtgacaatatatttctctctgcttctccctcctgacacagaattggagcctaagcctctttgagacttttcagtcaaagctggattttcatgctaacgtatcttaaccatacaggcccattccacatcttgcaaatcttgtgccagaaaaggatttccactgccttgcaaagctgtcctggcacaaacagacctctgcgggcatagaacagaatgagcacagaaagactacacagcttcctgtgcttgacagggtaggaaggaggctctgcgctattcccctcgggggaagaatcccacacactaagtataatttccaggcaagttgagtaatggggcaaaattaaattggactctccttctgtcttaaacctaattaatcttcctctaccatgcacttactccactaaaatatggcattaaaattccagcactttagttagcactttccagcagctttctataaggagtagtaacctgatctactagttcatgaaatcctaatatggaataatttagaaaagtgaaagggttggttctcagcaaataaataagatattgacttaggaattttagatcccaacagtagaaaagcagtgccccagagatataagtattgttattattattactttgttgtgtgatcttgagtctaagaaatctatcatgttagttgttagtgtaattacatgctttgtgagcatactccttgctaaggatttgtggaaacagaactccctaatctataactgttagtaactcatatttattttgaatttgttctggcttctgtttttcacatatttaagtgtcagatttgctgttgtgtgctaggaaaaaaaatgtttacttcaaaatcaaccatattttgatttcaatgtacatcacagcttcagggtagaagtgcccaggattgagatggttgaacaagggtatattttccacctgccttaaaacttaattacaactagaatcttttcttcccccttaagtgagtaaatcccagaccaaacctctcatgtatttacttgttttgtccatgctaagactacaaaaagagaaaacatattctggcaacagttatcctaagagagaaaaattgcaaaatacctaacatgttgaaacatttagaaatataccacaaatattcatgtttatgggttgtttatatgtgcatttacatatatatgcatatattattatgatagcttaataggaaagattcctgcatattataaaacttagatttatcaccaactctagttttatgacattgactagaaaggaaggaccagaaataatggttctctttagctttagattgggtgatttttaccatttatgtatattttatttgattggcataatatagtggagcacatgagcaggtcatgtacataattctcttttttttccctgaaggccaagcatataagaacataagagtgaagttctaaaagattttgtagataaatgattgcaataagatgactatcgatatttaggtatgttttaaaaggacagaaacttaatttgttgtttcttattgtattgtttctttaatatttacttaattgctttcattattaaatacctataattaattgattgcatgaagaaagcaagaaataagtgaataaaaaatatgtctataccaaatgacatatataaagtataaaacaatgatcagttagatcataaatattttagcttctgcagttcatacagtctctgttgcaactagtcaactctaccattttagagcaaaaacaggtatggataaagtataaacaagtgagtgtggctgtattccaataaaatattgtttactaaaatagtctacaggctgaatttatcccatgggtcatgctttgtcaagagctgatttaaggcatcaagggcagccctttattctcaaaataaataattagcttataggtattttaataatttgcaagacttcatgaaaggatcggctcagaggaaacacaattcacccaaactttctactgacaagtcatcagtatatagatggtgtacaggaccaagcaggcctttagactttctctcctccctgccactaaattccttttggccttgctgtattttatgagttattcttgtttccagcctaatacgaggaaaatgggtagatggcataagaggacattgaatgtactgaaggcagcccaaatattccatgcattagtcacttcggatatccagtggagtgaatgcggcattcattaatgcccaatgtcggcccgggcaaagtccagacagtctgctggcagcaagaaagctaaaggcaagaaggcctgtgtcgattgtcgtctgtacttacgaggctgagaaacagtagctatgaatcagcctgtctgagactctgctgtcattatttgcagcagtaaggaagataatattttaaaaagctttcaggaataaaatgagtcttaaccactagaggaagaatcacagtctgcagctacattgcctagaggcttaatgatgattcattgcaaattagaccaattaagaataccccccatattgtagtcttgagtggcttagataagatcattggttccctttgactcctgggatcctaaaataaatgggatctcagagatttctggttcagggcttgtggaatgttagaagtatgaggcatctcactggagatctggtcaacccatttctttacagatgcgtaaactgagctctggtgaggtaaatgacatccagtgattcataattagtcggtggtgaggtagaaattgagccagcactcttgattctgggttgatagtttgattcttttattaagacaattgttatgtattcaaccaatgtagtttgcacattgttttccaaagtgatttcatcagagaaccccttttgtttcctcacatggttcagagaagaccagagttctccagaacctacttcaggaaactctttaatgactacccgacaccttcaagccctttcaactccacccacacatgctgttttcaagtctggaaaatgagatccaaagagactaggttgttggctcctgaccttgcctgtatattagaagtacctacagatcttttaaaaattccaactccaagccacacccagaccaataaatcacaatctccaggggcaggacagagacatcatattttttgacgtttcccaggtgattttaaagtacagacaaattttgggagccactgggacagggcatttctacctctgctatatctcacataggaaggcatcatccattatggtgaaaacatgatttgaggacattagaagagatggaataacatttcttgaaaggatgccctgccaccattgtgaacacacatcagagtagttctgaagaacaaaggaacaaatataggtgaaagtgctctagaaaactgaaggatttatataatatattcttcttttattttaggaggtattcagacttgagctagctgtgaatgctgttttatctaactatttactaggaagaattattctgaaatcagagaatcagtaaattttcaaaagcacttaacttttgaaagtagacctaaaattaactcaatttttctcctgagatttttaatattgttgctgctgctgcttctctgatgatatctcgatgggagtctatctgttgtaggatctcaacttagcagctcacctgtttttctttcagagagctttagtacatagtatatgctgtttaaagatagaagcaagagtttgggtttattcaacctttacacagagtaatttacttgtgctggcttaaaaactaagacccaaaaactatttttagaagaaattatgtttatcctatatttaaaattcaaaatatttcagatgcattcaatgaaaggaaatgcaggacatgtcataactgagctgctttcttttatttgatgctctcacataaaaggcttattaccatattccattcaaacacaatttttaaatgttttctgagtcttcttaaatcaaatcctcctctaccaacacagttgggtaatagatggctttggaacaattagctgaagaggaggatgatgatgtacttttatatatttcaattagaataacactccagtcgcattgttgagattgttgtttctggattgcagttccaacgtcatactgagtttgctcattttcatgagccaagatgggctctctagtccttgattccctggctcatctcagcttgtaataattgcttccatactttcccactcgttcccttacttcgggtttgtcctctcgtcccttcagttcctgtacccttccagaggtaaggcagaacagcaagagcccctatcccagagttgtttatctaaaacaaattcactgtctcaatacagtcgaatgcattctagtttccagaggctgtggttgcattgtaaacacacaatacttacttaggttgtgtttaattggggtggctttaagagattctgggaggagctaagtgacctctcactcccagctacccatcagtgtattctctcccatagaagtttaaaatttaaggcaaaatgaaactgtcttacaactcctgattcttacactcatcttcaaatatcttgctttctgtaggaaattgctttgtgagatttaggaaggaaaacccaagaaatacttgccctgaaaaaccaatgaactgagatctataatggaagagctagtgcccttgtaagacggaaatctcagacattggcatcttttctattgtcctagtgacagacttatcaaaataaacagacaacgatgctctcctgaagtggcagaaattcctcttgaaattctaggaaagtgatcatgatggggagatctccagagcagagtcactcaaatcaagacaagataggagaggagggaagttgagctgcccatcaggagaaagaaaacagactgatagcatctccacctccacccaagaaggcccagtgtttgcttttctgagattttaaccagagttacactgatcaaacttccattctaaccaaacgacaggtcttttcgatcgttagtttttatgtgtgggcagcctgatgtcccaggcatccatgtggtcggctcggtattttcatcctgtccagtggatgctgatcttagaaaccacatgccctcagctgcttctacttctggagcaccatttccaaccccaagttaacaaaaactaaacagctataatatatttcagtaggtgaaattggaaaagacaggaaggagggagcaatatgaagatgtcccacactgagaagacacaggtaaacaaaagaactgtcaagaggtatttctatcaatgcagtggagcattgtgatcttatttatttcaacaatatctgtttatattcaacaggtgtgtcagtaggacaatagaagagatctttaatgtgttgagatttttctttttatgtaagcactagctcttccccaattatcctagtcctttggttttcagagcaaacatttcttagcttttctttcctaaattccacaaatagaaattgaggctctactaagtaccaggccaaaggacaggtaacagtaaactcatgaaacttaattttactctacaaatgaacagttcaaatacctgggttctctgtttttatggagatccaaatacttatttagaaaattatgtcaaggtttttaagacagtcgctttcttgcaatcattttgagccatatttttagtggatgtggaaagtgcaatcaagtatatgaggacatggaatatctttctttagtattattaccagaatactgtctgagaattctgattcaccactctctgtgagggtggtgacacttgcttcctattgtttctgtgtgtctgtttgttcatatatgggtatgtacctgtgtgtgtgtgtgtgtgtgtgtgtgtgtatgtgcttcttgcatattgaacatgaatatcatctgttcacagtgattccaagaagagaaattcacactagtgtcgaaaaaaaaaaaaaaaaaagcagggatggtgaccttacttcttaattcagaagacacattccatgctgtgttttctaatacttctggatcatagaaccatgacttgtttttttcatttaaattgtttttcctgttgagtccaggtagggcaggggctctcctatggcatgcatgttaataactgaggcacgtatcactgcccttgacttatgtcctgcttttttctgagttaaacctctttccacccacagtctccttcattctcttcattgcttcaaggaaaactattaaagctcttataaaacactacggcacctgagaactgacattagtgagaacttcatctagctccttttactggggctcttattttgtggaggggcagagggaaccaattcctctgagcttttgaaagagagtaaaaccactgagtgagttttcaaggaggatagaaggttgaatctgcatatctcatgatctgcacatgtaatttgcagcatgcgtccctgtatggggtacatgggatgtaggtgatatgaatgtgttcatttagttatataacaatttgtgattgaagacctgggtactaggcacagcatacaaggatggctctgcctgtaaattaacaggaagctctcagccaaagagactgggaaacaatttcagtatttctggaatcagagagctctgagctcacattccaagctctgccatttaattaatgtagaattgtggcaataaacataacctctgtagatctcaattttctcaatgaggaagtaaggaagaatagcacctgctgtacacagaaataatgaaacgtaaatggcatcctatatatagacagcctggaacaagtgaggtgctcaggagaaattcgatgcttttccctttttatcttgtgattggtaagcggcctcttttatatccctaaaccttaccttattttgatcaataacagccacatggagagattcaagtctcctagaaggaagacctgttggccttcatcttccaacagacatttcattgccttaaaaggagctctgtaccttatgaaaaggagaaaaagatgctgcctcagactagggtgaatttactgctctctgttccctgtaatttaaagggttaatttgctttcatcttcctcccactgagaaccactgttattatgggatgcaggttcccacaaaaataaagtcagatgcctttttcaaagcataaactggaaagaccatagttaatttccatgagtcaagagagcaaaaccctgggcaagtctttgaaaattcacttgggacactttatgtcggagagacggcacttaaaagacaggaatcccataccttggattcactttcccatgaaaggctgcagaagttactacaggaaacaaaaagcaattcacctttactctaaccgaccctccccttcttctccaacttcctccctcccactgcagtctgctacctgaaaaattctagcatagcgagataacttgctttaacactttgctactcaaagtgtggtccatggaccagcagcatcgagcacacctggaagctggttagaaactcagaatcttgggtaccgcccagacctgctgaatcagaatctgcatttttacaagatccccagagatttgtgtgcatcgtggagactggggagcagtactttaactggcatccatgtggatggaccatatcaaagctgcatttgctaatcttggatcaaacccatttttattgtggatctttcatttttattttcctgttataaaaaatatttgatagagaggaacaccccaacacaaagccctccaggtggaaaatttagtctctgagagttttggagctgtaaattgttaatcaaaggtcttaagttctatgtaggctcactgaaaacctgcatgtacatgtagtgatatttgcagctttatatgtcattgtctaatgggattttatcactcttacctgtgagtaactcaggccagctttgaaaaccatacttttgttttcctgcaggaacaattttatatgggcctgtgggtaaaatgaatactatttggctgacctaaaccacatcaagaaaattaaagggtgaaaaaaattcacacaaaatttaagcacagtcagtagttagggataccttttctttagtttctactttgtttgtttttttttgtttttaaactgaggcaggaggctaggcactgtggctcatgcctgtaatcccagcaatttgggaggccaaagtgggtagatcacttgagcccaggagttccagactagcctgggcaacatggcaaaaaatctgtctctacaaaaaatacaattagctgggtatggtggcacgttcctctagccccagctactggggaggctgaggtgggaggatcacttgagcctaggaggtcgaggctacagtgagccaatatcgtaccactgtactccatcatgggtgacagagtgagactctgtgtcaaaaaaaaaataaaaataaataaattgaggcagagatgtggactaataaaatattggtgagtatgaaaaacatgcagttcacatctaaatataattataacatgtagaaattctgactcattttgcaaacaccatttattagtaaagaagtgttgagaatcagcatatgcacattttttttaggaggcctgttgaggaatgtgaaataaagactttttgccttcctaagcttcctgtaactagaggacaaaaatgtgtttctggctcaccatgacccattacgcagcagaggaagccctatgagtgctgtaggaagaaggaaggtgggagcgagagaaggagagctgaatcctacttgagtaccaccagggaaaacatgcatgtgtccccaaggggagttattaaccagaggctcagctcactggctctgctaatctcctgagcctacacattacacaccctgcacatttccagtcactggggaaagttcgaggaagcgagtcctctggttggattgggggcaaaccccttctattcatgggaaataggagaagtgagttggtggacatggcctgtgacctcctgacagacggtctcttcacactgtggcataacgtggcctggtatgctttgatggcctcccacggtggtcgtcttgatgtgtctttcagtggacactgatttttatcaccaatccataacaaactattttgccgacagaaggaaaaggagggagggggaagggaaaagcagtgggtagctgataacagtatacatttagaaagggcttagaaagactcgtagcagcatgcttcaggggctccatctgactgctagctaagctgcttccagattttcacatggacacagagggacactgaagtctactctgtgcttccaagttcctagttattaaagagagctcaaaacaaatatgtaatgctcaatgtttatatcaatttagacatgcataaagtatatgtggataatttatacatgtaaaactcatggaactgtaggctttagatctgtacattttgcttcatgtagactatccctccttaaaagtaagtacataatttaaataacttagctggacaggaatgatgaagggaaggaatggggatgatgtgatatacgattggcctgtcattgataactagggtacatgagggtccgtttaccattttctctttaaaacccgagggcaaagaagcagttattttgaagtcagagggtggtttacctttataagggagggaggggtggtgctcggaggggcgcaagggatgccagccgtattctgtttctcgacctggacaagtggtaacatgggtgtttgctttgtgagaaatcatgaagctccacatcattgttttctgtatatatgttgcatttcacaataaaagtttcccaaacttctgtaccttaaaagatactataaaatacacatataaaaacacatgcctacagattcatgaaaggattgtccatcacgtcgtgcattcctagatcctgtctcgtgcataaattagagtacacaggaaagagttgaacataaatatcccccagctttctgcccaactgattgtctctaagagaacaacataagctcagtagtcacccagagggtggggagaacttaactaaaatatttttcattttgtcggtattttgaaccctgggtccctctaatcaaaaagctcacatcttccttgcaagtaggagcaacaagtgttcacacatttgttctaaagcagatgcagctttcctcaggatctttgcacctgctgtagcctctgcctgggattggctcccactgaaacctggcaagtacttcttcacctgcttcaagatttgactaaaatcatactttctcactgctaaaatctaaaattgctatgacacgtttattgacatttcctaacccccttctctgttttaatattcttctttgaacttaaaaattttacttcattttctctctccctgtcttctctctgcctctgtttctctttttgtcatgacagtcatttttgtcagtttggctcactgcacctagaatactgtctggcacatagtaggtgttcaccaagcatttgctctattgactgaataactaaactgagagaagcaggaatatatactacattaaagtcagtcattgacataataaactcattgtttacaaatagacttgttggcttaagaatcaattttattttattctatcatatttgttattgtttattttgtaactgctgcacgtagattatattttgcctgttgtgcgttgtggagcttaacctgggatctttgtttgtaccatgcatttaatcagaagtcatgtttggaattccaaacaccaacatatgaaccagtccttgaaacacgacctctttatgtggcagaaccgtacctcaagcgtcccccaggtcagtctgtggattccatggccactcccaagatttttactgctgacaattattacaccagttaaaggacatattttctagctgatatcctgctgttgttatgaagaggattgattctaattgccagtttcctgcatttttcttcaacatttagcttttgcaagaaaaaaaaatcactatgaaaattccacacgttactaggattacttcacaaacagatcattcttgactttggaattccccccagactccaaactgagcttatccatacagaaagcttgaattcattttgaaatgggaggaaagcagggcaaaatgttatctttgagctatgccatttggcttccagtggacacacaaaatggacacacatcaaatgtcaaccaggctgataacagacaggaagcaccactgtggacacagcaagcccgaccttcactggcagcaaaagcctgggtgaaacacaatttctctgaccctgagtcaccccaggcatgaacaaaactaggcctgcaggtgaggatgctggatcatggtgcttcagtatctaaggacatcacacagaaaatcagactgaagtctggccaacagggagggctgagtttatttatccattgctgagagatgagcaaggcagaaaaataggccctggttccaagtcttccctggctccattatcaggaaaacaggacaatatacacagaaataaaatacagaaacttcctcttcaccatcattttgaatctgtcctggcacagatttgcactgactccagctcacagcagattcagtatgaaatttatcttcataggcatgtgacccttggctgccagtaggctaaaaaatatagccaacagtggggcaaataaagataaagaagtttgtggaggacaaatactgcatttcctacacacggctttgtaattcccctgtcccaggaatgaatggaaaacaaatggatacagtcagccaccagggaacctctggtgtgttatctgcacactactgcttgtgaagaagtagataatcattttgcatgaatagggacaagatgactaattgatattgctatgaataaatgatgtacaaggcaagcagacagaacttctcataaaaatgtcgttttcagctcacaggctttgtgcactgaagtccttgttctattttcgtattcaggcagctttagcttaagggttcaggaaatgattgcgtgtacatatgtgtgtgtggtgcatgtgtgaatgatttatgatttttaagtgtcagacttattttttgcctgccattcttttttaaacacaagttagacttttaattaaatcacatatgttttgaactcaatatgtatgtatattttactttgactacctttaggttatggtttaataactttggtcttagtttgcgctggtgcgtgttttggcctttcttattaatgtcttgcatttatacagctgttttcaaagcagctgtgaagtattttaaaaatttcttcccaaggggaagaaacttagtataagcaatataaaaaaagaagggagaaaaaaaagacaaacattcttctatggaattctgtcagtgtatatcagatagaccaggaaatcagctaagctaagcaaacatagacattttatgtggcaagaacaaagtaatagcctttttactttaataaatcactgtcataattgtcccaaagtgatttgatttgagaaatagactttggggaagtcctccttcccaaaatatccaccttatctgccgttctctgatagctgaaattccactgtttgagagggttgtatagagctaaagggtgcaaatatctctgcaaaaggaggagccactgagatatttacacttcagggtgaggtgtttaatcaaatgtgataagtaactgggatatgtttttcttgtgaagccactaattctaagaggggaggggtgtcaagatagtggtgggaaggactgacagagaaggtaagaaggtgtcaatgacaaaagtcaacattctcctaatatgtttgggggaccgtgtatgttgtatcccttgttagtcctttggtctgtgcagcctgagagtctcagtttagtttgaacacataagtatcttggggtgtggcagcttttcccaatgtcctaagtttttccctcaccctagaatttctgaagtcaacctccgttgttagaaagatgttcttgatggattcttcttatgcgtgtgagcacggaggaggcagaagaaagtttgagaatcacttgcaagcttatccatttgtctatagtgaaaataatttgagccctgatgggacattgctccctggggcttcctagctctgcgccactaaaagaacacaaaggaacattgcagtcttcatttttagagatggcctctgcctctcccatgggcaactaccgtctctgtccaggccacctgtccctttctcctgccatccgcatgctaccccatggccaaaacgatggcagagttgcctgtgggcatggtaggacttcgggtcttttctcagagaaggtcaatgccgtggttgtgtggtggagaagcttcaggggttatgggcttaaggtaggttgttggcattcttgagtctctaggaatccatctgttaaggggaaatatacacaccccacggaatttcagccaatcacattacctcaagattttactatgtctatgaaccacatatagaatcacttacacatttttaacttcctttctttcactttctttgactttgaaataaaaactgagctaatctcacttccactttttccttcaacgtacttgctaccattttaatttatgtctatttgtgtgtctggcacactggacctgatcaatacatatttgtcaaattttacttgtttggtgttgtcaaagaaatattttcaaaaatgtaaaatgcggctcacctacaaatatagaatgaaaattggtcagctagtttttttcaactctattatgagggcatcaataagatgaaaatctagttccaaagataaatagaaaatcaggttatgtggcacttgacaaagaatactgaaataagatgtctaggttagatacaaaactggctaatgtcccacaggacaatcaaatagtcaccttaggcgttattttttttctacccgacagaggctcttgcatctttactggatgaaaatcaccaacgtctatctttgccactacatggcgaatttaatgagaacaaagattgtgtcttttaacttacacacattaactaaatttacaaggaaacttttgttgtatccataaataaagaatgagtattactttccatcaatggaaggaaacatgctatggttgtcacaacaggacagatcagctgaaagatgcaagcaaaagataaaggcttatttaacattgataaagcatacagtttactatgcacagatttgcaaagaggcacagaaagcctctgttatggaacgtcacactttcctggcctttgctagtcacaaaggtgtcccactgctaaagacatgatcaggatgaggatcttattaggtttttcagggatcagcctttgccaaaaaatcttttttttctccttctactccttcccaccaactctataggctctcatgctctcattacctgcctgcctgtccaataggtgcacatagctgaaaatgtgtgctttgggacactggtggaatatctttctcccaggtgaaccgtgcccttatgaagcccgagttttaggcctgatggaggtctatcctggcagtcaacataaaatcattacaatgaatattgtctgccaaaagttctcaatctagagtctgctgtctctttgttataaagggagattagcaagtgttagagaggtgttgaagacatcctagtgccacactgagacttccccctatgacactagcagggtgactgatgaagaataaaaagtgagtaaccttttcactaagtgactgtaattttttttaattccacatctctttcacacattgggagtcatagggctagagatgaaggctagcaccctcagagggcctaacattcttgttttcatttctctgagaatagcattttagaaatgaaagagatgttagcaagcttctaatgcaagcctttggacaaaaggttcaaacatagaatatagggacagagattagaattcatgactcccaactgtagtccaatgctcctaccagtctaacaatggcttctcttagaagacttaagggtagctttgttttctctctatggaattatgtttctgggtccattgctctaggcagaagagactggataggtattaggactagatgccttctgagaatgtaggcagagacctagcagtagcattgaaatagccttattaagaggaagtacaagcctctggtgccggagctgctcagattttgttttcaacctccacttctgactatctgtgtaatcttgggtaagttatttagcacctttgaacttctgtttcctcgtctgtaaaatggggatgatattttggcttctctccttgagttgttgtgaagattagatgagtaaaagaaaaatgcttagaagagtgcctggcacattgtcagcactgtagaaatgctggctgctgctgttactggcctgcccaactctctgatggtttcattcctccttttgttctcattctacagataattctgttggttttagaaaatagcatttatacagtactcaaggtcatattcttccccacatgttggcagaggagcctggaagagagaaaatctccagcttgctcgtagaacaaaattcaagtagattgtgtttttgaaggggaaacaatgaatattgaaggaaagaaacccaactggcatttgttccagcaggacaaagtgatggcaagcaagcaagaactggggattatagtaaacacgcagaaaatggctgaaggcagggcaagataataaagtagatataaagatttaaaaagattttaactgaatctaaacttaaaggaaatttaaaatttgtctgtaaataaaaaataaaagttttgggatccttaattaatgaccctcataagacaccctcagtaggaaataccaggattcctccgtcaagcaaatgttctgatggtctcaacccagacagcagcattcaaaatttggatgctcatgatatgatcttctggtttttagcttctgattttaaggagtgaattcagacagatcttctgatgtaaacaaaggggttgactccatttaaaaaaattattttgaaaaacattcagctataaatgctgtgtgctaacccctatggtaagagctcgcctcaaggagtttataatcaagtaagtaaaacatagaacacataagtaagtagtgacaatgttaaacacttcaacagaggtgaacatagggtgtagtggtctatttgtcatcaaacgtggtcctagagaaagaaaaggacaagatcacaggaggaaaaccctgacactctgtatgctggtgagacactgttttgttcagttttgagagtaccattttaagagggacattccagaggaggagaagatggatgttcataataaaggaaagtggcagtgttgatacttagctagggaaaagatgaggaagggggccctgatatcatcaggaaggcaaattgggagagtatcatgaagagcatcatgggaagaagtggattctatctctattggtttgccaggatgactggatggaaataataaggaaacagctttgagcatattatgatagtctgtaataaatcatgcatgctactgacagtggcacatgatgtattttgaggtggtgagctcctgaccactaaggtgtttcttaataaccacaccaaatggctgtcagccaagtgatcttactataggaaaaatttgagaactgcttccaactctaatattctctaactagtagaaaaatcaattcaaaataattttttatttaaaacgattctaaaagcagatctcttctacaaaatgatgcaaacaggcgtcatttggaatgtaatcatcagccagaaacatttagacccaaattctagcccaacttactagataagtgtgtgatttcatataaggacattctcaaacaactctaaatttaaatcatatcctcaatccatcctcccatcctctcccgtggagctatgtccccacagagcagctgctaaagtgttaatttctggagctgcagggtctttcaggaccttgcttgtgttccaagcctaattggtctttgcatgaacattatcttttaaatattgtgttaaatatttttactatcacccctccaaggaaataatttggaagtgaggagtgggagagggaaggtagagcttgaggaagaaagagatgacatgaaagttaaagaacatgtggtttgagaggacaaagcagaaatggatgaggaggtatagagacataatatgatgaaagacaaactattacaaaaactggggccctccaattgcctaccagcaatgaaataaactactttccagctttgtagccaagggcaaatcatttgaccacactaaacctcaacttcctcatctatagaatgaggataatgatagcaacctcacctccttttgttgttgtgaatatttacatgatccatgaaaagtaagggtaaaatttggcacaaagaaagctgtcattactattgttattgagtgaatcgatgctaaaggctttgcatgccccatatcattcaacccttagcatccctactcatcattgaaaaaggtggtaacccctaggtaacaaagcacatgataagggggcccaccattatggtggacagatctctaccctgagtttgtgttgatgtcgttaggcccattatcactccaggaatcatgggtggatggctgggctgacaaagctttgctgctataacaacacaggcctttttgatgtccttgcctgataatttctcaggcggtgttgtacataataaaaattacatgacctgaaacccaactagagcacactcagcaatagagaggcactgcagccagtgaggcatcaacacagcacaagagatatgcgtaaaagggaataaaaggaatagttagtttttaaaattagctatgaaaattgaatgcagccataaaggccatttctaagtgatgctattcatagtatcgattttgaactttattctgctttttttttaaaaaaatggaaagatggttaaaggttaatttcaaaataaaggtagatgcaattgtgggtagatgagggaatcacgtcctaggcatgattagtaggcacaggaagagttcctagaaagatagggaagagagatgaagggactttgaaagacatttcctagatatcttctgttctgctttttaaattcatctcctcacctagctgtgttatttaatttcttacatacgattccactaggcctcagctctgggaaagaagttatccattaaaacccagtgattaattgattcagtgtccaagattgctgtctgtctgggccagccagattttatattgatgaagactttaattccaaattacatctgcacaacacagtgttctcagaaaaagaaggtaacatccaaagtgaatgcaccttccaggtgcaactgcatttgaagatagcgggatcaaggcttctatctttattggaatcaagttaattcaaaatactatcaaatctcagggctcaatcaataatagctactttactcccgggagacaggtttcaattaaccttcaaggaagctcactttggtttttgttctgtgtttatttatttttttctattctcttccatattattagttaggagtaatgatctccctttttccatatgggtagaaaggggctcttggctgtactcacagtcagtgataagaggaggagtcaataatagctcagtagtggaccatgtaaggagacactttgagatccggcattgtcctgatataagtgaagatctttattcaagtactgattttacctttcaggaatctcctctctctctccaccctcccctagaagtccagtacatttatattgccgctgaattccgagctttctacctgatatagtgtttcaaggtcatcccccaaataatagaccaattgtttcctcatctgtcctctttaccatcccaacacatgcccagacatccatgtgctgccccaaattaaagctattattcaacaattgcttgggaaggatttgggcaactaatttcgtaaagagtactcatggcttagtctgacagggatttgcattgcataaaaaaaaaatatgtgacatttaagacatacaggagaggctacggtggaagggattttgcatgtggaaagtgttgagtgataagaattgatcaaaaatgaaatttagagtgggcgtctattgtgtcgtatcaaagaaaaggtattatatgtagttagaaggcagaaagaagtggcattaggaaactctgaagaaatgctgtcagactttgtggagacagagggcacccacaaaagaagaaaaaggaagcagaactgaggactactttgcatttgtttagacacaattgtaaagggtgccaagaacatggtgtgaatctgaacaaacagagtggggtgcccaagtcagtgatgaactggatgcaccttcactgatgataatgatgataatggctggagaatgagagaaccacaggcagaggaaagaagcagcaatcagaggtgctgtgaccagcctggaggttggtggggaactcacaaccccatggctctccacaaataattcttttcactggtcgctccctttctactccctgattcatctcatctctttcatgaaagtgaggggtcccatgatgtgaaacgatctcttgtagccatttcttttgaaactctgcacattcaagtttggcttctaactaaccagcctctgagcaccttcgtggctttgccaccaagcagcttttcagccaccagagggatttcatctacttaggccttgtctaatctacaaataagggtagactaatataacgcaggaaggttagacttccttcaccataaaatatgtgatgagtttcacaggttctgatgtttaaaaataaaaatacttgagagatatttgaaaaccaaagatctggagcaaccaaaacaaacctttaggtggtcccagtcattctgcttctgttaatgaaattgttcttggccataaataatttctgatttattgaagatctctttcctataataatcaggctgaaccctcatctcttgatatgttgctgctatgatggcatagaaaggaccagaagtatcagccaaagggagagagaaatgatgtccatgataaaggttttatcttgattttacaataagtttgtgggggaaggaaagaggtttcagttcacactagcaagcagtaatagtaaatggtaaccttttaacatagcacttacaatgtgccaagcaccaggcatacaagaattcattccattctcacagcaaattctataaaataggtattagagccccattttacagataaggagactgaagcacagagtagtcaagtaggttgaccaagattatgcaactattaagagataaacctaggatttaaaaccaggaatctgtgacttgattcaatgggcataagatgatggtaggatcattcacttttaaatgtcttggtaaatatattattaggacagagaaatttctcctgcatgtcagttcccttaagatcaggctactaaacattcagattacattcccaaacgacactgcagaagatctggattgctaattaatctaagagttggcactgtatgggaaactaataaaaagagttctggtaaattctgttttactttttctgatcttgtaattactctggcatgagaagtgcctatagaaaaaactattttagaaatcactaatatattacatttagtattacttttaactttaacaagcaccatccttcaaagaactccctctggacagagatggaaagtgaagccagagggttatagtaaagtgacttcttcaagctccaaagtaaatgatgtcacagaaagatcaacactcagattttctgactccagatgaaagatttttttatgaactacattgcttctgtatttcaatctctgtctctctgtctgtttgtctttgtatctatatttctccctccctctctccccccactttcaaatcaatgatcttagcatctgtataactcagaatttccatgggagtcgaagcagaatgcttgaaggcattgcctagagaggcagaagactgagcaaccgtgtcctgcagattcttttcctaaagcttccaagcagctcctgactgcctctcaatctcatggtcactatctcaactcaggacttcatgaagtcagccctagacctccacttcgggttcacctgcctctatgcttcccctttgcccagtccatatccctgccgcttgcagttttattttaacactcctcatttaaaatcttcatggatttttgttgtcctgaggcttattccataggtctttgttgtgcggaaaggcacttggggtttacaggtaaggctaatttctgcctctgtttccctgtatgccaggctgtctatatagatactttaacagctgttagtttcatcagtattctgaggaacagtacacatttgtgagaagtgagcacagtgttcttattaaaaacataaacttaaaatgtaacagcctgagcttcacttccagctcttctcccaatagcatgggatggctgaagggttagttggaggatgcttggtcactcttatgtctggcagctgacaggtatcagccaagggctggctgactctcagctggtccaccttggatctctgccacaaggccttccatttctagcaggatagcttgggctcattaacgtggtggtcctagggtctcaagtatgcaagagagcaagccccaatgcacaaatgtgttttaatcctctgcctgcatcacatttagtaatggctcatggaccaacacaagtcacatggctgagccaagatttaagggacatgaaattgactgtacctcttgatcaacagggaggaatcttgcacaatctaccatgcattctaagttttagtatccttacatgaataatgaggttgctaatgtttgtttctgaatcataaatttggagtgagaattagatggcatgaaatacgttaagtgctctgtacagtacttgacaactaaaccgtacttaattgatattattcactgcttacgtacaaatgtgaatcctgcagcaattaagaaacaaagaacattctttagcatcttggaaaacctgttttcactccatttttgctatacagttttaattcagatggcttctccttctcttttactacctttattccagaatattgatgtgtgagtctaaaggatttacttgatttctagtgggggccaggtttaaacaacctaggaggcaacattaatatatgcagacatcacaatggaccacaataggttaagaaactatggttgaattgtgatgataaaaagtacttcagaatgtcctttggatttattggtttcattatagatgaattatttggataggattttcggttaaattcacacagcccatgtttttatttaagtcaatttatcagagttgtgagaggctacatctggctgtgttctaaatagtatggaagatatccacgaattggtcttatgttagaataaaaaaatggctgcagttattcccctctctgtatccagactctcagtgtgattttgcagttcatccagtcaagagaggtaatgtccatttccctactccttgaatcttggctggtcttgcaacttgctttggccaacagaatgcaatggaagcaatgttctgtgagttctgaacctagatactgagaagccttgcacactattgctcttgaagtgagtgaagcagcatctgagtgaacaaacctgattttgcctgctggagaataagaagtcatgtggaagaggagcaaggcttaccagccgacaatcagccagcccttggcaaatggcctgccaactaggaggtatgtgaatgaggccatcctaaaccagtcagttcctagccaaagcagcagctcaacacaggctgatgagtgagcacagccgagatcaggatagcctgctgagcctaggaaaattgcccaggcaactgtgttttgggatggttttgcacatcagaatctaattgacataggactgatggctgcaactctcagcattctccttggcaggcttcatgagtaacctgatacctcatgagacccagatgaccgaatattctaactcgacttagtgtatggatgtgacttggtagaagaagaattaaaacatgtgacagataacacggcgaaaccccatctctacaaaaaatacaaaaaaatttagctgggcttggtggcgggagcctgtagctccagcttcccggaaggctgagaggcaggagaatgacgtgaacccgggaggtggagcttgctgtgagccgagatcgagccactgcactccagcctgggcgacagagcgagattttgtctcaaaaaaaaaaaaaaaaaaagtgccagaaaattctgtcatctttttttgtcacaagcacggcagagggagtttctatctgcattcctttttgtgcatgtataatacacccatggactcaatacacagatgcttccaatgtgcaaacataccacaaaatgtttctctatggacaatgtgccacaaaataaatagcataattttcagttagaacaaactaggtttctacctatattattattgtgtgaccttgagaaaaattattccatctctttgaggctcaatttttttccaaatgcaaaatgagaaaaataatacttgctttaccatattaaccggcaccttgggattactaagttaaagcacaatatttgtatcctggtttgaagttggtctcaagctttttgagcctcctgctattgagaagggtagtctatgtcctgttcccttgaatctgggcaggttctgtgtttgcttttaccaacagaataaggtggaagggatgctgtgccagttttcaggcccagatgttaaggcactggcagcttccacctcctttccatcagctttcacttcctgtctgttggaactcactttcagagccctgagatcagcctttcagaaatccccactaatgagccaggcatgggagggaagccaccctggaccttccaagctggtccagctgcctgccaaataccaagagtgaccccaggtgacgtcacatagagcagcaaaatcagccagagaaaccctgcttgaattcctgactacgagtcattacatataataagacaagtattgttttgagccactcagatctgcggtagtttgttacacaaccatagataaggagaacaatttggtgcagggcaggcccttgggacacagagtgactgagcctgaggagttttccatacctagtgcaggactttcagtgctcaaacctatgaagtcccaggtaaaagggaatgagttggtctccttaatatgctagagattatcattgtgttgtacaaaagcgaaattaaacaactttgtggtaatttcatttctagcaaaactgcacaacggccaccgtgaaatttgataccttcataggagatgagaaatatttcctgatggaaatactgcatgatgccgtgtttcatagaaggcaatctcctgaaaatcagttctacttgattttcttatctatgagaggcaactttttgtttaatagaggctttctttaaaacccttatacatgaataaaaaacagcagtgtgagtccccaacagcatttcaaatttaagtatcagcaaagcatttttactgaacatttgaaataacttttactgataactatctcccaggtcctgctaaaattagtatctttttgattgttatttgggaaaggcttttataatgtgtataattactaccttattttttcctaatataaattgtaaatttatttatatcattaaatagtttagattctatttgtataactgccaaaataatgctctgtgttgaaaatttagaaatatccagaaaagaataacaatatgaaaatattttaaatagacaaaggcattttacctttaactgctctccagtcatcgttaaagaaaagaaaaacaaaagaaataaaaaataaaggaatctgcattgccaatgacattgggagttctttaagtctaaaatgaagaaaaagtgtgaaaaaaaattgatgagaagaatgatactttgatacttgggcaaaatctagggaggataaaggacaccagtatgtgtccctccctgcacagccccatgcaatgtcaagatttctacagaagcaagcgagaggctcctgaattacataccagtgtcttttaactaaatgatggaagcccaagattgtgagtggttcattcatgaaacagagggtttccctatagacttagtcctacactgcccaatggcaggaggccaagagactcaaggggaaactcatctttgcagtagacatactagacaaaagtatgccaatattttgaacacttttgacttctcctgccaaattgcttcccagatggtttgtagtgatatagatttacataaaccatgtttaatgagttgcattaagtattatcattctttacatctttgctgattagggcaaaaaatacagctttgctttttgtatttacaagtgtattttaaaattaggagtgaatttaattcattttccacattactaagagatttatataacttttttgtttctgatttgtctacttataacctatacttatttgtgttttcagtgtcttaattaagtttatatttattcacatgttatttgccaaaattattctcgggtggcttttttctctaatagttgtatttatttatatttttaaaccctgattgcttcttctttggggtgattggagaatttagcagagtagagaactggcatgatttccagaatgttaagggattctgcagtctaggcctcagctcaaatgtactagtgatgcctgtctgtatccaaaaacccccataatagaaaacctctcttgaaatttctattgttctattcaattctattatctcaaattgcataaggttttcacttatgcaaatataaagacactaactttcatctccagtactttgtgaaaatgcttcacacaggggcagccagcccggcctactggccagttaagagtctgcaactaactggcagccacgtgcccaggatgctactgcaatggtagaatacttgcttttagtttgaccagtttctctttgttcttttgtggatgcgtatactaaatgccacaaaggagggtgcagggactttgggtctgaggaacccctcctgtggatggattgggcgtcaggggtctgtgagactcaagctggtgtctggctttatcactcctggagtctaggactgcacataaataccaccctgtgttcccaagaaacagtctgcccagtctgcccagcctgcccaaccctcagggagtctggcgaaactgaaccagctcatggttgctagagaattgcctgctttcccatctgaactccccaccctcagctggtagggttttagggtgggtgtgtatttcagtttgtcagaaagagatcagttcctgtgctgaaaggcaagctcggggcagtatttgacagagctggggacaccaggagggacaatgaccatgtaagtggttctcacgccggacctggcattgggtgccagcttgcacattaactcctttgacagtactttcgccagtttactcaacattctcaagggatggctttgtcaattgtttctctggctgctattttgacagtcgatagccccttgatgccagcttaggctgtctagtaagaaagaggccaacgtgaaattttaaacccaacaactgctggatgtggtgtggggtggctccggctctgttctctcccttttttcccctctcctgaatggtaatgggtctttatcagtgcacttttttcctcattccccctggcttttgggaaggggaatcatgcattaccctaggtgggtcagcatcagaggggtgttgaaatttccagtggaaactgacagaggatggtaaacagatgcaatttatgatattaagaggattccagacaaatgtctatgtttgggttattctttatgtcaatttccaataagcagcaacaatagactggataagaatcaggctctgacataaacagcatggctcctggagagggaatttatgaacgaaatctctttcctgtagtcgcatcgacaagacacacagacgtcacacctccatgttatttgtaaacagtggcaaaagaaaggaacagaaataagaatgtcttccttctctaaatcccctagttacgcatgtatcttagcattccagcaaaagcacgttcctggcatccctcttgtgtctatttacgagtcagatcctctttctaagaacaaatctacagtctgaaactagctaccttaatattgccttgatctttctaaactgctcatattgcaaattatcgatacaagttataattttgacccattgaatctgttttcattttagctaccacactaagcaccattttgtattttaccaactgaaacagtttggaagaaataagatgttcatttttctttcactgactctttagcccaaattaaaatgcaaaaaattgaatgtttttacttattttaaaaacatgtttttgctctttcaaaatcaaatgtagtaatttttctatgcttctattttacaacataacttctgaaaaaatttttagttctatagaagtattaatttaaatttttaattcaaattaatgcagatttttaagtatgtgattgctaatatttcagggtttatcatagtctactatttcaattagtaagagtagtaattgatgtataattttttattagcttagaggtcccagagttaacatatttctgatcaacctgaaagccacagaaaagcgaaggtgcagaggtaactcattccagaatttaaaatgtccctcttagttactctccttaattgccctgaccacaccctctttttgggaagtaaagagaataacacacaaaccggagattaagttatagtcatctgatattaaaggggaagaacattttaaaaatgcatttgctgatcattgccacttgctttgcagaacctaatacatccctctctgataacatcaaaggaattaaggccctctttatgtagcaaatgcttttcacagttcaataaccattcctgttgctgctataatatttcactcacatttccccatgctcagagtaggcctcggaactggaactgtttcattgctattgaaagcaccttcatctctccttaccacatcgtaccgcctttctccaaatatttgccagccataatcattatattcctcagtaaagtggaaaaataattcctctgttttggagtctattttctgagatatggagaataaaaatgacgtgctctggagttatcaccctttttcctctgtctgtctagagagccaaaccaagaggcagtggtgagtggcttgacacatgaaccagaaacaaacagcaaaagacaggaatcaaaagccccaatgtgactgcaatagaaaccattgttcaaggcacttcctgggaattatttagggattatagtgtcaaaattgcttaatctgtaggaaataccccaggccttcaattcacatcagcaaatatgtattaagtgcttactctgtgcccaggactgagtgaagcacttaggggaacaaagagaaaatataagtgcattgctgtataagcaaaaagtgtgagtggactctactgaaggaagtaaaaagggaggtgtgtgcctctgtgcatacattatcttcttcatatcttattaatattgaaggtaggccttctcagctccaccctagatcccccttagacaaaaaccaagcaagagtttttctgcagattggttgtttcaattattagtttcaggaacagacacactgaaggttttgaaacctaagaaggaggaatcattaaaaatcaacatctgtcagagagagcaaaaacgagaggaggcaggactgaaaaagaatctcagatccttaaaaggactgttatgaagacctaaggggaaaaaaaaagaagaatgggaaagtaaactaaatgggatgtagtttgtatgttttattttagcaacaccagagaggaaaaaaaaaaaagactgatggatactctcgagtctctaacatttagaaatgtcttacccatgtttagttttcatttttttattctacaaaatcgaaagaccccaatctaattgttttcattaaatcacctagataactctcaggtttctagacccattcccacccccctcgcaaggaaagattcagccaagcttgttgttttaaaaggtttctaatcacaggagaaccacactcaactttgctcatttcctgtgccaattaacagccaggagtggttgtctccccactgttaccacaaggaattccagggactgaccctttcaaacttgactcccggtccctgggaaagtggcatcagttttggaaagaggcaggaagttggaaatcctgaggagttacagcccaagagcctgagaaccagaggggcagggccccaggagtgaaggaagctttatttttatttctgaattttattctgtaatgaaagtctgggtcctgggaataaaacaacagcaaaaataccttgttttattgggcactcaaggagattcctgggtctggtgagcactatataaatctgccaaaaaggcccaagtgtcttgatccccagaatttagatgaagggaaagaaagctcccaagtttggctcagcagagctggagcagagagagcaagaggcccaggattctcattcaggcctaggctccacacttacagcctctctgacttcctcagaaccaagaggaacaaagtgagaaaagcaggctagaagagaaagagagacaatctaaaagagccagtattctgattgataaattggaatggctgacgccaagtcaggaaaagctattttccctgcttggaatgattaccctagttctctctgcttgactaaagctttgaagcccttcctcctgcaggaagatgtctctgactattccagtgtatcaattatctattgattcagtgatcctgtgtgataaactaccaaaaacttagtgttttaaaacaaccaccatctatgaggtttccaagtctatgattggtctgggaagttctgctgacttgggccaggctgggatgattacactggggctcagaacatgattaaggtcagtaggtaggtgccagctggtccaggatggcctggtagagagccactcagctctgctccatgtggtctctcatcctccagtgggctagcccagtgttgttctcatggtgatgatacagttctctgggagagagaggagggcgcaacctcttgaagccagattcagaaagacacaacatcacctccactgtattctagttgttaaaaggagttggaatgccagcccagatagggcaggtattgaaatagaccctacaccttgatgggaacagatgcaaagtcacattgcaaattgtatggatatatgaaggttctgaagattgggattgtttttgcaatcagtctattacaaccaacctctgcaaatttgttgaggccagaaatcctgcatcatgtttaccacactgtcccttgctttcagtagctctctaattaaggattactaatgttgcgggacttttccttagttcagctaaagacaaggtccttgtcacacagccatgaaaatgtaggctaacagaccatttgaagagtgagaaaaatgggatttattggacaaaaaggaagaaagggggaacagagactcttagtgaagtgagagagtgtttcctgcctgtgggcttcccacattgtagactgaattccaggtttcacccaggaagagaaggggccagggtcttccccactgcaaatggcgaggacgtctgtggctccaccctagtgcacaggctggttggaatttctctggggaccccttcccacctggctatctcactaataagagcactgactgtatctccaaattaacaataaatacctggaggataacagttttctttattcctgtaccacttacaaggtttaacgttgggctaatcattttcttgctaatttttttccgttgttgtttgaataggagtgaaaaatgacatccagaaactcaagaccttttgtttccagagacactatttttctagtattatgttcattttacttactgcctggtacttaggattaagaaatgtactgagccaagcccagtggctcatgcctgtaatcccagcactttgggaggccgagatgggtggatcacttgaggtcaggagttcaagccagcctggccaacatggtgaaaccccgtctctaataaaaatagaaaaattagctgagcacaatagcaggtgcctgtaatctcagctacttgggaggctgaggcaggagaatctcttgaacgtaggaggcagaggttgcagcgacctgagatcgcagcatttttcactccagcctgggtgagagagctttttttcttaaaaaaaaaaaaaaagaaagaaagaaaaagaaatgtactgcctgggttcgtgcacttaagaaaccatgaagacattttggcgtgtaaaattcagcaacacatttctttataatttttttaaataatctcaatcccaattggctaattgtttaaatttattcacagatattttggaggttctgatatcctcccataaaaattaaaatatctatagaaagtagaggaattctgggttctattttgtcactattaaatcccatgtggtcccttggagtttaacagagctcaacttctcagccagatatgggaagtggatatctaaacagcatccccggggcacccacagccctgcctcttagaagcgtaagccttcaccagggcattgtcaggaagaacagtgtgagtgcctccgctcatgtgggtaaaacctgtggacacctattcctctttggggaagaaaaactcatatttctgtttccccctttgttatcctcaaaggcctgcatcctcttccaacacccctacctcaaggacaccaagctcaaagacagaagaaccacaatcttcccataaattctgccttcaggctgccagaagctcttgaggcatgcttcgacacagctcagccacctgctttgattgtgggaaggaaaaaatctagggagacaaatatccaaatttctatcccaaatcaccccgccatggcttgtattttcaaagaagcgtgtggtattcttcaaagtgtgcactagatctagatcttgttctcatctcctccttcctaacttccttcctcccttgctgttgctcagaaagaagcaggtgaattccaatcagcactgttagctcgcaaagggaaggtcacggtaggtaataatataggcaggctcataacaagttgtttgaaatacaccctagaactatcagatgaagtagtggatactaaagtgtattctcaatcccagctctttgtttaacttcaagtacaggccagctgttcagcagccttggggaacaaatgcaggaataactaattaaaggaagatgtttccaggctgagtgagaggaggatggtgttttgaggagaatggtgttttgatgcacaaatagttggcctctgtcataaaacctttcttcctctctctgtaccacaaccattgtgagcaccacaatccaagtggaatctctatagtcactcaagatgttataaagggtggttatgactccattgtttgggagtccacacaacagacctggctaggggcatgtgcttctaagagatctcttgcacgatgggactgtgactctcaggcctcccaaaacacgtctactgagggtctcccatatgccatggacttacccctgagtgaacactggtgaataaaagacacttggctcttgccctcaagagcttacattctatggagactgaaccctttgcctgaaactttcttttgccaaaatagcttgaaaatttattacctagatgatagggtttggatctgtgtccccacccaaatcttatcttgaattgcactcccgtaattcccacgtgttgtgtgaggaacccagtgggggataatttgatcacgggggcagtttcccccgtactgttattgtggtagtgaataagtctcacgaggtctgatggttttatcaggggtttccgcttttgcgtctttctcattctcttttttcctgctgccacccgtgtaagacaggacttgctcctccttgttttctgtcatgatagtgaggcttccccagccacatggaactgtaagtccaattaaacctttttcttttgtaaattgcccagtttcaggtatgtctttatcagcagtgtgaaaacatactaatacactagagtagacatgaaactggtgcccccttttgttagactctcaaatatggagaaagtctcctctgttctcttctccaggatagtttgtctccccttctaagacccacatcatcttacatttcctaccactcttgactaatttatgcttttacgcctattatcactctatcaaatttctatgatgttatggtaaagaaacaggaaagcctttgcctcacttttactttaaggcatcggattgcagtagtcactggatatatccaccatgatgatttcattccctttgctgttctcaacgtttggagtaaaggaattgtgtgataagattactataatgtattgaaggaggagacataagaatcaatgcctacagaggccaagcaggagatgaaatgatgtgatatgaagtgaaatttaataggagttggtgggcactaaggtgaaatgaaggtcaaatgccccacataagaggtttagctgttaatcccagccagttatctccatgaaggattgtggtcctattatagccagcactttcaaatttttcaaaggcatacaaaaatctagatttcatgtaagctccctcaagttttttaatcttgaggaataattaaatgtgtttttctttcccttataaacaatgtgtaggccacacaaaacatgtcactggatgagatatggctttgggacagccaactgtgtctccagaacaaggaatctaatgctgtgctgagataaagcctctatatcttctcttgcatggagatgcaggccagttgagtaaaatgtgaaccagaaggtcctttctccagcatgtaaaatccagagaagggccctatagctctaccagtccatatgaatctgtgtaggaggaggcaaaatatccctgaggcatggatgtcaatatgccaaaaatctgaagcatggatgtcaatatgccaaaatcttgctttgctccatctttgtgttatgattttcattgaggcatttgagtttgatgagatcacatgtgcaccttgctgtgtctggatggactacctgtgtactttgggttgagccacctcaatgtgcatctggaaatggtaagttcctgggtttgccttctgtaagggaggcaaaaaaattagtctcaccagaggtgagctagggttgttggctgtactccaaggagtaagacttcaagctggcttcgaattgtttcccaaagcaatagatctattcagagactctttttggttcagtttaatgaaaccacagaaaaatttgcaaactaatctcaccaagacaagatgataatagaaagcagacttttcttctttggatgtcacagctgatgggagcatcttcaaggcggtactggagcaaaccttgctttgtatcctaaaggtctgggggaatgtggagctggcaggactctgctttgaggagtacacattacgcatgctccagagccttggtactttatattcttcactgcctaaaatgctctttggctctcataattataaagacctgctcctttaagttttttatgcccctgcacaacctcctcacacagcgctccctttatgaacttatctgcaatagcacctgccactacacttctttctcccatctggcttgagtttacttcatgaaacctctcactaccttctgctgacatttctttgcatattgcttgtcttctccactagaatataaactcaatgagggtaggtatttattcatagattcactcctgttttctaatgcctagaaagtgtgcagaactatgtaaatactcaaaatatgtggtcattgaatgaatcaatagcttgttgtgtatatagtaaggcggcatgtattttgagctaagcagattatggctgggtcttcccaagcatctttttttcctgtgtcacattaggtgtcagtagtgaacacatgtactttcccatatctgtatcgcactgaaaagctctcatatattctttcatttaccttaaattttgtcagtttgattcaactacttttggtaaaatgatgcttctgatataaaaaaaggaagacttggccaggcccgatggctcacacctataatcccagcacttcggaaaacgctgaggtaagtgggtcacttgaggtcaggagttcaaggccagcctggccaacatggaaaaaactcatccgtactaaaaatacaaataaattagctgggcatggtggcatatacctgtaatcccagctactggggacaatgaggcaggagaattgcttgaatccaggaggcagaggttgcagtaagttgagattttgccactgccctccagcctgggtgagagtgagagactttctcaaaaaaattaaaaaataaataataaataataaaaaagaagacttaaaatacttttatctaagttgttcaaaatatacttgggccctcaaaaggcctttcttaaattaatttgatggtttaagtgtgcatggatggaataacatttcttttcacagatgagtagatctaaaattgaaggaagataaatttgtaggctttagtgattatttggaaaataatagctttggccattggatcagcttcctatctgtacaactcaccaatttctaataccagcatttcaagtttttgtatcctttattttacccattcatttccctgtcttcaacacgaattccaattacttttctttctttttgataactgaggtaatttttaaagcatgttaatgaaccaagaagaaatactgtttctaggcattttccaaagctagagttccaagatttaatgttactctaaaacaagcaggcaatgtgaaaagaaaaatcgaacatatcatccccttcattttatttcccacacaaatataaatgtttttgaaagtcaacattgcattccaatacatgcagggaggtagtggtagaaagagggaattagaggatagctggagctgggcaatcacttgaatgctggtttatggcaactctttgtcaaatgatattgatctttggttccaatctccaattactaaataacgaaattaggcacatattctttaaatgactctctctgtgcttgtatgaaaagaaggactggaaaatataccaagaaaattaccatcccaaatgtgtttggctccagcattccactaaaagagctcttgtttttgtggcaaaagacttccttactaaatccaaagactatttcccagtcattacctttcttctcttctcagcaatgtttgcactgtgactcctcttcctttctcggtacacggccaacttgtagcttccataattcaatggtctagttttcctcctaccttcatgaaatcctttctctgcctttggtactggcatctcttctacccactcactggatgttggcttttccaagtcacaggtctagctctcttctttcaatcaataatctcttttcaggaggtcttagctacacgcttcctttcaattacccacttattatgagctagagtcttatctccagcccatatctttcaacttttagacatttacccacgtgttaacttttattaaaagtctcaaagacaatccaaatctaactagtccaaaaccaaacttacaagctcataacctgaacttcctctagtctttacattccaggttatgatgctcacatttatcctgtaatgcaaatcacaattgaatcctctctcttctttatcccttctccaaaccaactccaagtttatttattaataaatctccattttgttcacttctctccaaaagtataaccactactctaacctaagctatcactttatttttatggaaaactgcaacacaccaaatgggtctaacctcacctattttagctcctaccttcccccaatctactcccttggggaaactcaaagtagactcgttaccaccagcttcaaatacatgcatgacctctcactgcattctggataaacagcacacatttagaccccacagaggccttctccgccaggtctctgcccactcctcaggctttgtagtgtacagtgaactctctcttcccccatgttagccataccaatttttttttcttttttttgagacagagtcttgctctgtcacccaggctggagtgcagtggcacaatctcagctcactgcaacctccgcctcccgagttcacgccattctcctacctcagcctcccgagtagctgggactacaggcgtccgccaccatggctggctaatttttttttgtatttttagtagcgacggggtttcaccgtgttagtcaggatggtctcgatctcctgacctcatgatccacccgcctcagcctcccaaagtgctgggattacaggcgtgagccaccatgcccggccagccataccaatctttatttcctttttcttagtactcctttccaatacagggtcttccacgtggtctggtgttccatccttcctaggttttctcccctatacctagttaactcttagtttgttcctcagatttcaccttaatgcctacgttctgaattaaatgtcccttacttacctgaccaaatcaaatcccacagcacctcttctttgagtagttaactcaaacactgttttatttttatttgtgatagtatttattatttttttgctttttaatgtctcattaattatttattaatgtctgctcttctcataggctgccagtttcataaagacagaagccatatctagttttcccagtattctatgtttactgtgtagcaggcacatcactcatagttgttgagtgaaggaatagcgggaatggcaaagtagtgtttacgtttaaacttcttgtcaaaattataggcagatttagggtctgtgtatctctgggtccctagaagagaataaaaaccaaggcagtggttgtggcctggatttaatgcctctgatcctcaaatgtgaagatgttctggaactgcagtcagtagactcaagctgagaacggaatggaggatccatcagaagtcacaggaagtgaagagggatgttgcccaattcttttcctcctctactttatgaggaacagataattgtctatcagcctggtggattaaatacattctctctaaaagtttcttttcccctgataacaatcactagagattcaaaacaggaaacacagttttgttgataggagtggaaaggggaaggacactgaattttactgagaaaattggtcctaatatctaaaaactggaagatgaaaagcatttaccaaaggcaaatgtgaaaagtggtctctacaaaatcttagtaactaactgcataaacttcctgtgagctgtacacatacagccactccgatcctggatttcaaataacctctctgcccttcctataaatccactccaaaatccttacactattggcatccaaatgagttctctcagggtatttcttacattcagaagtgatacaagaaacctctggtggactatgtgcagagatttctgcttcaaaatataaagtcactgtatacatactgttttttcagggttagataaataactgccctgatgttcttatttggaacaaattgagagcagcccaatgtaatacatagggacatgtcagtaaacagaagacattttttaaatgtagaaatatagtgaacccttgtactaggactaaactcagaatgcaatctttcttcagaacaacacatcttgaaaggttttcccagttctgcaggatacagactcatccaagctctagcactggtctttgtgaatgcctcttcatttcatgtttttgcttttgacctgctggggtgactgggatgagagggactggctcagataaaaattgcactgtccaaggtcatttttatttaacatatgcaatatttctaaagcattgtttttagttgccaatgtctaaaagttaaaaaaaattatataaaattccagattctcaatctcttttaaaacattggcctgatgacaagaattgtctatgcgtgtgttgcacattttactaaggtatgtgtccccagggtgccacagtcttcaccacaccgtatttccttcattgatttgtctgtgctaccaaaatctatcaccgacaatagagatatttatgactttttttccctcaaatgataaacagcccaaagtttaagccataaggagtgtatttgagaattcttagttggcttcacagtagtttttgaggtctttttagcatatagccactaatgaagctctttaatggcctatggctacatcatgtctttgtcacactttgtattcctgggactctactctgaacatgtgtcagcagcaaacaattctcttgttctacccattactaaagttaggaaataacttttagggatgaccttcaagacaataaccacttgttggaagtggaagtcatgagcttgtccagtggtacagaacatttttctctcattgagagttttgaaaatctgttgcctttatgtacaatagagattataggtacaatagagagaagaatggcatgcatctcaagcttcaatctcaagaatttatctggcattagtgagcagtacaatcttatcttctctttaattttgtcttttttgaactaacttctctcattgtttgataaattatatggtttgattgtgtatgtcacatgaaaatatatttgaaagatatttagattcctctttggaattaagtaaaagaagcatttggctataaacatgtggtaactgggtctgaggtcatgtacatacattcttttctagttgcagccaaaatcaggtttgggggtttctgatgagctcttttgtggttattgttattaaagaaaaatggatctttctgctgcatgcttagaaaaccagatattatcaccacttgattatttacttactggtacagcttgtttcacttattaaagaaaagacaaggttgaaattggatctattcaatgcatgttcgtggctttatgtgtctgtagataataagcagccttgggtgtttgttcagggttgactttctaggctataattggcatcattttgatttttctttggatgagcccacatcgttatggagtctgtagctttaaataagaaaacacctacaaaaatgagaggggcaaaatgttccctttggaagcagtaggggagggggcaggaaggggaggcttttgttcactcatggaaaatggacgtgtgtctcatggtagccgcagtttaagtaaacataaactctgaaccagagatcatacccgccatttcctcagcactagcaataccaaaccaaaatatagttttatttggctaaccccaaagtaggatgtgggtgccagccttgaaaaccacatgatcgggtttccagcagacaccaccagggctatgcttttgtcttaagcaagaaagtcacaaaggcaatactccttgtagtaccatcattatgtttagcaaacagatgcaaccataacaacagttaacttcagagacaacagttcactacagaaaaaggtcaagagggtcttttactcttcatgcgtagaatctgagctatcccatattacaactctattgagagaagaggcattaaaagagagacaatgagaacctagggcataggctcaggtagtggggctgggtggggaaagaatcctcccatcttcttatgagttctagagtcggccaatctggaatccatgtttagaagcatcaccttgacttctgtggaaagtcgttttttccaaacagtaatccagcaatgagcaaagcattaaattgtgattttgacatgtcctcattttgtcttttctcttataaagaagattcttcagggcccagggtcattccagtcatcccaagttcggtaagcatccagtcagggcttgctgtttcagaggttttcatggtgtggtttcatttatttatttaccatgaagctgttgtttttctcccttctctggagccagggagggaggggcagatgatagagttgggtgccctgagttaatgactagccctatattcacaagctcatttacttttgtcctcacctggcgcctcaatgctgccaatgagtgggaattaattttattgagggccactcagttccttaaaagaaaactgctcacttggctggaaatgctttgacagaaggtagagcagccggtcacatttgaacactgtgtcttctagatttgggggcagagggggagtggcagattcagagggagaggggaccaagcagtcatttcacatgagctattatggggtggccggaatcccagcagagtccatcaacagactctcgtgctaaagacacagcctgttgtctctttatctgccactccccactaaatctgtgcatgaccccccagcacccttctcaacaatcagctgcccgtaagaaggtaatcatcttatggtgaattggagaagaagaaaagacactctaggaaaatgttatgataatagaaaactcttcagtgttgtaaccatctggtgtgctacggtgacaaagaagccgataattgagtgcccaataacttcttttggcctgagataatgggcactcaccctgatttgtgttcttcacaagagtaattcgccatcatttcacaccacatctgcaccccatttcctccatcaatacagccttacacataagttaccacacttaattaagtccacatcattctcctccaaagaacagaaaagtttgagcagatccccgagtggccgagaggcacaaatgaggttttagtgactcttgtttggtgggagaaatggagattgatgaagagctcatgccaccaaggtttggctcccgggtggggcagggtagggctgcgtctccacagctcttggctgggcaacagctgtggataagcttaggcaggcagccctgtggccaggcatgctaggggaggggatgcagaccccattgtcacataatcttgcttttgaaattgtgctacaattcattccatttgatttctaaggtgctgtcaccagagcatcattaaaagtcctttaagaaactggagaatagactagatcaccaaaggcggctttgtcagccccttctctctttctttagtgtgtgttcccttccagctgacagaaaaggcaaagcctgtaagctcaggacaattaacaaggataatttcatttttctttaaacaacaatgcaaagttactgggagaatcaaagcaattactgggagaatcaaagcaatgctcgctgtaagagagagttttaaaaaatctttatttcaccatcttcttgaagtgagaagaatcattccacattcttatggttggcgctaagattctctttactaaaaggtttattaggggggtgtgtgtgtgcatgtgtgagttttctcctacaaaccactcctagaggcttaaaagtttcctcttcctaagaggcttgtaagcagcagacaacaaggaagactgagcctaatgagaagggcattaatcaaccacccaagtaccaatggatgaaagcagagattcctccagtctcccaactaccttagccataagtaaattagcaactctttatcctccctttaaaagataaggagggatccggtgcagggatctttaagatatttcccacaacaagtgtcaaaatacgctgaaagctcccaggggtccaactcccacacacagtatgcccttcatttgtttatctaaatgctgacaaattgcagtattttaacagcctatctgtgggcttggcttcatttgcatggcgtgccctctatctttgagccgataatgaggctcaacataaagccctcattgagggctctgcagaggctgacagtgatgaatacagagcaggagaattaggtggtttagagaagaatatgctattgtgtacagcccttatccctttctcttccctgctgctcattttcaggtctttcaaggaaactgcctctataccctttctagctagtgtcttttaccttcctttcactctgaaaggggaccatcttccaaatcgtcagctcagccttatgctattttagtcactataattatgttcccattttatcctatgaaatgctagaggtttcctttcactatgcaaaccactgagaaaagctggaaagcattgtcctgggaacatgcggcccctccacccactgaattctcagatactctattttacaatgcagaatccagccaccttctgtcggaaacattcggccactgttgctagacagagctgtcactgagtacgctgttgagatgtggctgatggttggggaagttacagaaatttagcaattcaatttccttcagaaatgtagcagtctgaaggtatgtgctcaaacagctaattttggttaatggtgtttatgtttttaaattgaacacagagaggatttagcttggtcagaatgagtgatgttacatagggattttctctagggaagagtgaatttcctgtcttggaaggcaatcctccatgtgatgtgtgacaaaagaagcttttggtataaaacaatgggcttatggcataatatgtttggaaaagatcttatggatagatggatctgactgatcacttcatttcttctaagggaagaaacacagaaggggaagtggtttgtccaaagtcacacagcaagtctgtgaactaaccctttctcatgcaaaggtccaggaaagaacatgatcttgctgaatgagctcgcagaaagattcacatacgggtgcactctactgcatctcagtttctgttatccatggctctcaacttgttccattttgatatgctttggctcataaaatcacttcttttactagaatcttttaaaaggatcatctgtaattctcagacctctgcctcccctgactctgattctgggatccaggattcattctccctaattctctaataatgaagtgggttatcctcatttaatctgctttcttcctgtttttctggttagttgaccttttaggtacacactgaaatcctagctttttggacttccctgctctcccttacacactgtctaatgggatgcacaagaccttgaatttactagaagtcatacatggtcagcaaaattatgatgctgatggcaaagggcctactttgcctaagaaatggctgagattccatcctactctcttttttgatgatgctgtggaactataaaagtttcttagagcctgtaatccttaaatgtctgtaacaaatttgtgtctacgtccgcttcttttaaaataatgccttttattttctctaattattaatttaaatacatgctcatcctagaacgtgtggaaattagaaaactgtattttagtcctcaccgtctctagttcatcaatctgatcattattaatgtattgctatgtatgtctcttccctttttcaaatataccaacattctattcttactataattgtcaggtctacatatttctttccattgacataactttaaaaaaaaaacacaaacactatatagtacatattatgggcctaagaagtactgtttacataaactgataataaatggctagcaggtcccatgaaagaaggtgaacaacaataatttaacatgtaatgattggtttgtatgcaaaggaaaatggagaattgttattacagaaaagaacacagttatataattgctttagttataaagtcaaatggtttcttgtcttgcattttctgtatgtaagaatccttaagatatatagcatagggtcaaacagaataaagagcacatgctttcaaatctttgctccattccttattatttaggaaattttcttagtttttctgtgatatcatttcttcaagatggataacaatgccttccaagattttcataataatttaccataatgcattttagccatttagcatagtgccatttgcagaaacaaggaagagtttctgcaaagataggagtttgataaacgtgcttgtgaaatcttctgaaattcatatctgtgatggattctcatacctccaggatagtgttggtgtagtctaagtcttcctgatgccctgggaggagaccagctgatcaacttccattgtaaggatgtatttgccacccctcttccgggggtccacccccggagctgcttcaagggccactgggagaatggtggtgaaaaccatctgccctactatgatggagaggtgattgataaaatttttgcacatgtcccttgtaagtcaatgactggggtctatctgtgactggatatgttgctcctacaggcattcaagcgggcatatgtaggggtatttaagtgctaatttttgcttcgaaaagatagggaaatttgcattggaaacattattaaaaacacagattgaggacgtaacatatggaaactagatagtaatcctcacggttcagcataatagcaccactctcaatgtggaactcacgagagcatatacatttactgatcccactttaaaaaaaatcaaagaaaaaatccaaatcatttgaaagtgtataatgcattccaacaatgcattagtgcatatataataatgtgtagcagaatgccttcctatgatggttaaaaacctagtgttaaactgatcgagggttcagtttatttccttggaaacttggtgaccatggactactttgaaaattgatttttgtagttgttgacttaaatatcatattttcaaatgtatcttgctatgaagtaaagcaaagatcaacataatactaagagtagattcaatgacaaaacttaggaggagacctaggatatagtttctgtttcattttgatcatgtttgtatgagacaaatctatatctttcagatggcaaatgacactgttagctttgaacaaaaagagatctttacctgctgaatcaaaaccccacaagttttcctctatatctgttttcaccttccttagtaatataatttccaattcagctaggcaaatggcttcctaaataaagactatattttctagcattccctgtgattaagtgactatataattaacttctgccaatagatgtaattggaagaaatatatgcccatcactgaaagtgtattttgacttatcttctccttttctagttggaatgtgataggaaaagcaggcgctcccactccgcatagccatcttcaaccatgacatacctcaccaatgatatctacatgcagcagaatgacacaacagaaaaacattgagttcccaacaccatggaacatcgtaccataattctaggactaagttatattcagaattttttaatgtcaaggacaatatacacctgtattttctgttattagaattgtttgcttttatttttcagattgaacttaagcttgactaaaatatccacactcagcattcccttctgaaattcaatgattatcaggttttctggaatcttcctgcagcagcatatcaagcagtgatctgtattatgagagtgtatctgctgcctctttgtgtgaaacccagggacccacttccaacattactttgaggaagatggggagggggtgcaaagcccattaccatgtgttttccagcttgcacaaaactccactgtgactctacacaattcttctgtgcaaggataaaatatttattattggatgttaccccatacaaaaatggcagaaggtccagttactcctcactcattgctcaattagcaggcactgtttggaacccctggtttctggtgagcactgggataacagtattcaaaatattcaggagacttttttttttaattaaatgagcttcattgggaaagtcagataaagatgaaaaccaggagtaatggaaacttaaactgaaaaataggaatgtaaattgtagcacaagtttctgaggtgggaagatctgggtgagtcacagtgttaagagtagtcttacatagagaagcagagatggtagtgggctgtagaggtttcatacaataaatgggaaagaagatatcaaaaatatatagccacaggaatcctttcatttacttaacagccttgagtttgcagggctgtgctagttgtttggatgaaaacgttaacctcaagcaagtaaacttaccttactagagcttagttaccttatctgcaaaatagagataataatagagttctatccaggattaaatatgtcaatacacgacaagcacttagaatagtgcctagtatgtagtacatactgaataattacaagttatcattattgttgttattatttgcagaggagctcaatgtctaatggaggtgacaccctataaatattaatggtagcggattgtaatgagttttatcatagaaatgtagatgcagcactccggaaaacacaggaggggggaactaagagttgggaggaagcatttgtgactcctccccagttaagtcatattagaacttagacttgcagaggggttcatgttatagtttgacttgcaaaggggtttctccagatgacgaagagcattgcaggctggtgcgcagcttgtgtaaaggtgaggagaggttggcaagttaaaagtttggaaaactaaagtttggtgtattgggaaaggctgatgatgttggggtagacagacagaatgatgtagtggtacacgctggtataaacatagcaaatgccaacagccagcatccattttgatagggtcacatctgttctgactggctggtacccgtgctgaactgagcaaaaataatgtggaggataatgtggagaatgtcaacacaggctttgtaaatcttggtttaaaaaaaatcagaaataagccccaattgtcagttcaccactctgcagagagacatcacttcacaaagacatttgctacatttttttggcctctttattatcagtaatgttcttgtgtaaaatttcttaatattgtctaattaatattagataagcaatttgtactaaaacaaatgaacaaaagaaaacatagatggtgtgctgtggcagagtctacactgtaccttttgttgtctgaatgatgagaatgtgcctcatggaaaagtggtaatggaagtggagctgctcatggaattgccatctacacttccctacctttcccagccaacaaataatttttctttccaatgatgagtgagtagagaccatgagtatcatttctggtcatttactaagctggtctatggtacctatgtattctgttcccctgctatgccaccatggagtattatgagaacacctttgttggacatgtggaatgagtaatgtttgtcaccttgatcaactttgtttgcaaggttaatttgtaatccagacatcatctagcactaccctaactaatgacagaactgttaccaggagtggggtgttagatatccaaaccctaaaatatgtagctttggctttgtgactttcagcagacagtgataaagcttacctcacaggctgaaacatggcaatccatgttttgcaggaacaaaatatttggtaaaattgtcatctgaggaactttacttggaaccagatgctgtgggttctgagccagaaactctcaggaaataagtcaaaaaaatagaaccttagcattgctgttgctttcctttggctagagttgacaaggaatcactgatttgaagggggtgattttagagagaatttaaaggttcatagaaaaacttaaatgaaatagaaatagcacagaaatgtggggccttgtactgtgggaaaaactctcaagccatagaggttgagatttaaaaggggttttaatgccgatttaccaataagatctttcacagaaaatgtattttttaatgtgactttttcactacagccaagtctctaaatagcctccattaaattaaaagctagatactcatgctaagaaggtgaggaaatgggcattttagattacatataaagtgactttcagtgtgattattaatatatggaacttactagaagtgaattggaagcctattgagtttttgagaaaattgtattgccaaagaagcagtaaaccctgtctaaaaacatctgtgactactgaggttttaaacaattcttggtcccccaaccatgcatggtcaggaaataggctgagaaagttgggtagtctcaaaggagggcatattccctagttccattacatgtgaccaaggaatataatagacaaagaataatttcctggaaagagacccagggacactgaagaacaatgggcaaggggtctccttccagaaaagagaatcaggatctaatcaagaaaaattctgcatcttcaggttctcaaacatctgcccagaaagaatgagtagacaaatggtgaatttgtgtcttccattattcctgttttgtggttaattgtgttcttctccattatataatggagagtcagcagaaaatgtgtttataggtcatacatttctgaactaagagaaactgcattcagacatgatagagatattattatctcatggatattctggattttgaaccagataccgtaataagatgtatcatttcttgtgaggagggattgagtgatttctacatctaagcctatcaggcagaattcctataggaaacaggaggcactcccaaattaggataaactgaggaatacttactgacaaagagattagttaaaaaaaaatgtaggtagagtgttgaggaaacaacaaggtatactacagaaacctaggccattgtcatccataggcccaaaggagggtgtgaatgattaccaggacctggaaggggagaagactgagtcattttgtcatgtcaagaggctcagaaagccaaggtgtcctcacagggaaagaaccagggcataaataccctgacctcattctcctcctccccataggtctcctgggtctttccttttagtagtcccagctgtaagccagtgggcattgaagcctttttttttttttcaagataaataatttattttatgttttaatattttttatttcaatagttttttggggaacaggtggtgttggttacatgaataaattctttagtggtgatttctgagattttgatgcacccatcacctgagcagtgcacactgaacccaatgtgtagtcttttatcccttaccacacaaccctttcccctgagtccccacagtccaatgtatcattcttatgcctttgtgtcctcatagcttagctcccacatatgagtgagaacatatgatgtttggtttttccattcctgagttacttcacttagaataatactctccagttccatccaggttgctgcaaatgccatcatttcattcctttttatgtctgagtagtattccatggtgtatatatatatatatatatatatgtgtgtgtgtgtgtgtgtgtgtgtgtatatatatatatatatatatatatatatatatatatatatatcacattttctttacccactcattgattgatgggcatttgggctctccatatttttgcaattgcaaattgtgctgctataaacatgcgtgggcactaaaaacaaaaatcacatgatcatctcaataaatgcagaaaaagcatttgacgaaatccagcattcctttgtgattaaaacccacagcaaaattggcatagaagggacataccttaagataataaaagccatctacaacaacccatagccaacaatatactgaatgggaaaaagttgaaagcattccccctgagaactggaacaagacaaagatgaccatgttcacttatattcaacatagtactggaagtcttagccagagcaatcagacaagagaaagaaataaagggcaaccaaaccagtaaacaggaagtcaaattgttgctgtttgctgatgatagaatcctatacctagaaaacactaaagacacatcctaaaagttcttagaactggtaaaagattcagcaaagcttcagaatacaaaattaatgtacacaaatcaggagctctgctatacaccaacagcaaccaagctgagaatcaaatcaagaagaactaaacctctttcacagtagctgcaaaataaaataaaatacttaggaatatacctaaccaaggatgtgaaatactgctacaaggaaaactacaaaatactgctgaaagaaatcatagatgacacaagcaaatggaagcacatcccatgctcatggataggtagaatcaatattgtgaaaatgaccatactgccaaaagcaatctacaaattcaaggcaattcccaccaaaataccaccatcattcttcacagaactagcaaaaacaatcctaaaatttatatggaactaaaaaagggcccacaaagcaaaactaagcaaaaagaacaaatctggaggcatcgcattacctaacttcaaactatactttaaggccatagtcaccaaaacagcatggtactggtatgaaaataggcacatagaccagtggaaatgaacagagaaccaagaaataaagccaaatacttacagccaactgatttttgacaaagcaaacaaaaacacaaagtggggaaaggacccgctattcaacaaatggtgctgggataattggcaagctcacatagaagaatgaaactggatcctcatctctcaccctatacaaaaatcaagtcaagatggatcaaagacttaaatctaaggcctgaaaccataagattctagaagataacatcagaaaaacccttctagacattggtttaggcaaagagttcatgaccaagaacccaaaagcaaatgcagcaaaaacaaagataaatagatgggacttaattaaacaaaaagcttctgcacagcaaaacaaataatcggcagagttaacagacaagccacagagaaggagaaaatcttcacaatctacacatctgcgattgaaaccttttgatgcgttctataaataactattctatgcacagagagctggatacagaatagggacagcaagtccgccggggcaaagagaaaatatatgaataacatgggaaagaaggaaaacaagggtgcttcactgaccagaataaagaaatcaggcatgtagtcttctacttacaccttcttccatacattgacaattcaattttcagtggggaataaatatatactatgagcaacagacattacaatatatgttacagattggtagggttcaaagcctcagcatgggataattgacctctgcattcagttaatgagtggttgatcttcgccaggactcaaagttcataacttctttcaggttatcatgtggctgccccaagactagtcatagacttttcaaaagtgagtagcagggagtagagtatatcgagttgactgtgtataactacttgaaggtgatcactccacgttcttcactgctcccactttgatttatcattacattaatggtgccaattctttacccctctctatatccatgccctttaccatgtgactttatagttcttttcactaacaagataaagcctgttttaccaacccttgaaaataggccaccttgcaatttgctttggctacataggaggaggtaaaagtgatagtaagccacttcaagcctcaagaaccatgagagcattccctagttaacctgctggaggataaaaaatacctaaagcagagccaagtcatccttgtcactccagctagagtcattatagcttcagcctgctaaactctacatgtgggagcaataacgggcaaaatcattggaatctaacctgcctgaagtttattcaagatatttgactatatacagttattttgtatccattgaagtttttgtgatcgtttgttacacagtactgttgttgtagataactgatacactctcatgtcccttagccacataaaattacagcttcatagggctattgtactttaatgacagctttgactgcaaaatgattttcaattcaattctcatgaatagcaatatcaacaatgctttttttctgctgcctttacgagaggtgtttagactcttattcacactcagatttttaatcactttttttctctttttttgagagggagtctcactctgccacccaggttggagtgcagtggcgcaatcttggctcactgccacctctgcctcctaggttcaagtgattctcctgccccagtgtccccagtagctgggattacaggggtccgcccccccaccactcctaatttttatatttttagtggtggaaatgggggtttcgccatgttggccaggctagtctcaaactcctaactcagatgatccacccacctcggcctcccaaagtgctgggaatacagacgtgagccaccacacccgacccttaatcactttttagctttaattaaaccctggccgagaatgcattagccctgggcttcagttccagatctgccttttaacagcttcaattgtgggtcaactaattcaacttgctaggcctcaaacttctcttctataaaatgggaacaaactgttctgagaactaaatgcagcaatgtgtgtaaagcttttagcctagtcctttatggtttcacaagttgatgagactgaatcacaagataaaagattgtatctacttcttgctatctcacttggagatgaagtacagtgtgtaaattaccatactaaatgaaagaaataagatagactgtacttacagtcacaatttttatttctgcctattgtttgttgcattgttttcaggggagaacagttttaatgagaaccagtaaccctaaaaataaaaataaagaggacaagagtccttagttcatttatggttagtgtttacatattcccatgagggcgggattgcagtctgcttcattaaatcaacaaagtttggggcaagcagtgtgctgaagccagcctgtacctgctggtaagagtcaattattcaattttcagtatttttttaaaagccagttgttacatgcaattgctattaaaaatttaatttttaaatttaaaatgaaataagttatattaaaaacaaagatagtaaatcctcaaagcttattgcttcctaattattttactatgttttgctattacccatgctcttgagcttatttacatcaattgtatctgcatggtggaaacactacataacagtatgtaaacagggaatcttttccccactcaaccttcagtgttgccacactggttgattacaagggccatagagggagtatacaccagagaattcatcaaattctacaaatcatgtttttttgttgttgttatgacaaacaattcatcaatgtgtccaagaatacctttgggtgattctgccagttgcacttagaaagacattactgattttgcacttgtttagaaatgacattatctcctatctacttttgctatgatattgggaagttggctataactatacacacttcttcaagaaaaaatagtcttctccaacaatctactgatgagtcaaacacacttaagaaaaagccatcagatttaactacagaatggggtcattgtaattcttagctacgtcatggtctggcaagggatggaatgagaacactatagcgggaatgaggcaaccttggaaacctggtacaaatattttctgaggaggcttcctttaatctgacttgttggcggactgtgctgtgatggaggcagaaaactagaaggccaagcccagctcaattgcctgctgtctggtgaccttgttcaagtcactttcactctcctgcacctcaattttacttacctagaaaatacaaggatcatataggtaatatgtaggatcttatatagctctcaaatttcatgacctccagctcatagacgaagaaatccaagagaaaagaaacacttctgaaagacagtccattgtatcttctccattatctttgttgacaaagagaatttcagggggatgtggccagtctgagaggtgctgtactttaaaggaagagaatttaatataaggcaaaagatttttcatggggagattatgacccatgccttgtagcttcttactttgttacagatcacgttgaaaagaaaatgttggcactttaagttcctgtacaattttaaagaatgcacacacaaattgtgcttcagcaggtgaccagaaacaagctgttttgttcaagtgtagagattgttgatctctggaaaaacatcccagcagggggtaggagtggcagagatgagagaaaaggggcctcagctcttgttgggtaaacagttacctggcctggtcagtcctggcagtctcctgcttgcctcccctacactgcccaccctcctgctccgaggccagaagctaccactgcctctgcctccacttggctgaactggggctgggctctcacctcctcagagcagaccagggggcactcatcaccctgagtcagatacaagctgcaggggatgaccgatcctaccacagaactctcaccacacacactttagagtctgactcaggcccaccaaagcaggacagtcagaattctgcggccaaggttccctcacctcctcagttcccaaacccccttgggggatcagtccgcccaccttgtgagcactcctgctggtgggaaaccccagggctttgggaggatttgagcagagaaagaagcagttttagccagagggaaacgggttttaagatcaagctgggagttggcactaagccttcagatgaaaattgcttcacactttgcaaacaattcctagcatccctgggctttgacttctcataattttgtgtctcaactttattgtagggcccagtagcctcctttttcttttgtttctatcagtgccagtcacaaaggggctctggtgggtccctatgacttaataaatctttcactgtgaggccctactgttccaatgtgtgacccctctgggagatggtcattgcctgtctagtgatgtggctggggctgcgtcggtcagtgatgctggctcaatcctacactacaagtgagatctgctcttctgtaaactcacttgataatataatatgcttcagtggtcaagataactgtgtttcgtcatttccttttcctctatgtgctttagctccatggtggaacctatgttttaatatataattttgtcgacatctctagagttttgcacaaaacctatctagttatgtaagtcattatcagctaatctgttagctctgatatgtggggccattttgaggatttcttctaatctgagactcttttttttctccaagtcattcttatatttgttttgtagttctttgttaattgattcatcaacccagattagagagttaattgctactatttgatcttggcaatgttagtattccctatcatgggatttaagagccaatgtattccactcctaagtgtataccaaagaaaaacgaaaacatatttcccacaaacatttgcacataaatgttcactgcaacattatttatgataacaaaaactggttaaaaatagtacatcaactgatgagtagctaactaaattatgatatatctgtaaatgggatattatttatctataaaaatatgtgaagtacgaatacatactacatggatgaatcttgaaaacactgtgtaagtgatgaaccagccacaaagaccacatattccatttatatgaagtgttcagaaaataggatagtgcttggcttgggttgagaggaagggtggaggagaaataaggagtgactattaagaaacccatatagggtttctttttggggtgacgaagtttccaaaattgatcatgatgatagttgcacaactctgtgagtatattataaaccattgaaatgcgcactttaaatagatgaattgaatggtgaattcaatctgaatgtgaatcatatctcaggaaagttattatactaaaagaactaaagggccaatttattaaacctctatttttattttataaattattttttctcctttgtatttattatcaatgaagtgtttcactgctgtgtaattaagaaaaatgtaacagcagtcaccttatagagaaacaataatacaataaaatcattatcaacaagagtgatcacagggtctgtatttacatggagtaactttatatggaacaagcagggaatactatgtagtcgaatgtggtggcaacagctattattattgccttttaacaattattggcatatgtgaaaatcaaggtccttttaatgcttccaggggcctacatggcctgctttcctgattcttctttggtttcatctcctacccctcttcctccttgctcagcagcctgcagcttgccctctataacaagcttggcatgctcccacctcagaacctctgccttggccttgctctttgtctagagtgctcctcccacatgtatgcacatggcttcacattcacactcactaattcaagctctgcccagaagtcaacttagtgaagcctcccctgaccaccctagtgtatccttcaaacacattaaataattcatttatcagtcaggtgcagtggctcccgcctgtaatcccagcactttgggaggccgaggtgggctgatgacctgaggtcgggtgtttcagaccaacctggccaacatggtgaaaccccatctctactaaaaatacaaaaaattaactgggcatagtggcgcatgcctatgatcccagctacttgggaggctgaggcaggagaatcgcttgaacccgggaggcagaggttgcggtgagccgagatcacgccattgcactccagcctgggcaacaagtgcaaaactctgtctcaaaaataaaataaaataaaataaaataattcatttatcatgtttacattttattgcgtgtcttttctgtataagttctttgaggtgagaaatctttggctgttgtattctctgaatatgtacagcggtgtctgagatatagtaaacgctcaattaatatctgctgaataaataaatgatcatagatgatagcagtgcaatttgaggtatatatttctgttctttgttagttaatttgtcagtcagtacatctcaagttttagacattctcctaacttgggaatgaataatcaaaaagaaaaaataactaatttggaaaacagggaaaatgtatctttaaagagtaaggagacaatactttaaaaataaatcaatctataacaggaaatagactatattttaaaatacctagtctgcaggtaaatgattattttagtaaaagcatttacagattacttcgcttctctttaaaggtaacaccatatattaattcagcaaccatataaatattaattgagtactttctgtgtgccaggcacatgatgttagtgatgagccagtggcgcttacattgtcatggaaagactaacaaaaaccagccaaacgagtacatataatgtcagttggtgctgacagctataaagagaaacaattaaagtaagcaataataaattaaaggggtgctgggatggttagcaaaggcctgtctgagatggtgacatttgcacaaaagcatgagttaggttaggtaagagtgcaccttcaataaaaagagtgcaccagatagaggaaacagccaatgcaaaattctgcagcaggaatatgtcaccacgttcaaagaaaggcaaggtgtgatgaggaaaatgagaagaaatgatattggagtagccttcaggaatcaagtcaccctaaggccttgtggttataggacttacagctttattcttggagccaaggttgaactgacatgatcagttctgcatatgtgtgacatgatctggtatacacttcaggactattttgacattggggggtaagagtataagcaaagcaataggatgcatggtatatggaagccagaaagaaatctgaggctattctcaatctggaaagcagcaatgagccacaagaaaaaagagctaagttgattcagccctatcttggaaagatcagactccagatagaagtttgccttcatcctgggggctgctctgtatgatggtcaagctggcatgtgtctagggagtgaaccagacagtaagaagaatgtacctcttggagtgaggaactctctgctgtgttgtggattctgtctccacaaaagcaggatccaaaaatatcttgagacatactctggttcaggatgtaatgtcaggatgctccaccaggttcccaaagttacctaaaacagagggtcttaattgagtttgctcctttctttgattggggttcccaaaagccatccctgagataatattaatatattgggggaagtagaagaaaatcagagatgggagagggaaagggagagagagaaaggaaggcagcccagaaaggatgtttcacaaaatcagctactgctgtgagcaagtggaacctagacttgctggagactgctggaaaatggggtgaagcacctttatcctatccaagtggcaaggaaaccgggtgtatatgcaagactcctagcaatcattcatctggcctgccatgagtggctaacctagacttagataccagagactgtccttaggcaaagagtaagttgggctgctctgccctgaaggagtaaggcaggaacgagtaaggagtaagagatgtagagatggtacccacagtatctgctgcaaccacccctcagggaaattgctgttcactcaggctaccatacaaatagcaccccttggggttttgcaacatgcatcttgttcattctcccccttcttgtcccccgctccagtcccatctctatgatatttgttgtgcaggatgaattcacgcttctcaacatctaagccttcggcacaccctttggtggaattcaaagtttctgcggagcagagagcagtaattaacagtgagaccttatgatgagcaaatcacaggtcagtaataactcagttcttggggaattcagtcatggggaagcaacaactcatagctcaaagtcagattcccttctatttgtaacaatttctgggtgaagaagcttaagaagctagtcgcatttttcccggatactggcagccattgtttctctctttttctttctccattaaatagtacatccggggcacctgtgtcccacattatttaacaaatgatgttctcattttggcaggcaacacagaaaaatatggttcctttacaggattttccttgtgagctacaattttgatccaacaccaccattgatctggaagaaaattatgtataatagagttttaattagactctgaaatgaagtgtgtgtgtgtgtgtgtgtgtgtgtttggggttcgagtgtggatgtatgtgtatccatacgctcgcataaaaatggtgacccagttttaactctactggtacaagcgaagctgttgtaagacagaaatgacttcatcaggaaatcctcattcagacttccaaatatacaaatagatgccttttattccactgtgaatcaaaatgatgccatgtcctgtaattaaggatgttattgaccaggttgaatgggcgccaaccatgccttgcctttgtttctatgacagtcatttcaaagttcagcatcttaagtctgatagtcaccttatttggcaaacattcaggaattctgcttccaggtttatttcagggtgacagaattttcatttaatctttatctcatgttaggagacacgttaattgcttgaggccagacacacaaatatttgtgtgcttgaggcaggttactgtgcagacaaaaatagtcatagatgaaagaaatatatatcctaacatagtgacttgagctaaactatcattgagccgaaggttttttttttaagttgtcaaatgtaaatatatgtgggattgagtcaatagataacattagcttattatttctttcctgtggaagccatatgcaaccattagtctttttaaatattaacttctcaaactgaccaggtaactagctcctgtgggttctgtataatggtaggatgaaatggtccgttgaaccagcatcttgggtgggaggggagcagaaacacatttagagcaatgatacaaacacctctgaaatcagcaactcaactctcagatacacagggcctgtgtggaatctcctccttcgggggcactctgcccaacttccccagctgcaggaaagaagacatcaccctaaacactgagagaatgcctgaacttgccgtgtcttctctctcgcctgctcgtccacccccatcaaattctatctttgttttaggccatgactcacaacccacccccacccttcagtcagctgtgactcatagcagaggccagataaactgaaggctgaacagcaggggtgggagagagctgcagtggtttttttttccctcttgctttttttacccagtgagaaaagctaggtcaaatggtcaagttgtgggaatctttgagggtttatgtgtatgtgtgtgtgtgtgtgtgtgtgtttaatttgggggaattcctgcattgactgggggattcagctaggtgtactctttgaaggtaacaataatattgtggttccaacttttaccattgagaataatctaactttgattgcaaagatggcctccaattttttttgaaacatttttgggatccttgccttttgcaatgtgactttactcccattaaggcatcgggtctcttttccctcctttagagtctggggttggacatgtgacttcctttggccaccagaatgttgccaagaagtaagtgatgcaccagtttagggcctaggccttaagaagctatgcgttttcctgatctctcttttgtgcttctgttttgctgtgataggctagcctgctagaggatggctgcatcgtgcagcagagccaggtcaccaaggccagggctgtcctagatcagccacactgcagcagacagaccagtggactctagaaaattgagtgagcccagctaaaatcagccaaccctggttcattgatgaggacccagctgagctgcccagctgaccagtagctttgtgaggacccaagagcgagctgtccagctgacctgtagctttatgagaaaaacaaaaataggaacaaaaacaatattgtgattttaagctactgtgtcctccctttggcccttactctgtagagacttcacatgatttacttcgctatcttttttttttttttttactttcttttgaaagagttcccttaccctatgacttcaacactgacctttctctaaggaggatgctctcatacgtatctttatctgtcctctcccttgcaagcgtgtccagcccgtggcccataggccacaggcagcccaggattgctttgaatgtggcctaacacaaatttgtaaactttcttaaaacattatcagattttttggtgattttttttagctcatcagttattgttagtgtatttcctgcatggcccaagataattcttcttcttccaatgtggcccaaggaagccaaaagatgggatacccttgcatcttgagttttcatctcatgtccccagttacctcctgggctctttctgtcggctgtctgggtactgctcatggaagaaatgtcagcaggaaaaggagaggtcttgtcttcaacccactgctgatgcatttcataacttttggcttctcagggtctttgatgttcctgtaaaagacatgccagttaacaacactaagtgatcacacagataagggacacttgtaatcagcctcaaaatcactgggcctaattcccgtattgaaatggaaacctgtagaagcatacgtacctgctccctcacctgtctatgcttaattaaaatagagattttgaggctctttcttggaaattctatttcaggaggtatgggttagttttccagaaattcacttatcatttggacactccatccagacctccttcaggatgaaactcatcctgcctttcaggaggtgaagaaccctgaggtggtaggttcaggcctcagaagtcttcactgcacaggagaaaggagggactcctctcttggtgtaatcatggctttaatcgatgaatgcttccttgtaaaatactctgttgcaccctcctacattaacactgggcttatccatgtggcttgctctggccaatggaacaactttatattaatattatgtaatatacgtgtgtgtctatgtatgtgcatatatatatatcttacacacacacacactatgagaaaagtgttaagattgttttggacaaagaagattatggatgagtacggttaagttccttttggttttatactgctatcctaacctgtctattcaaccaatcatctatctatcaatccatacattaaatatttactaagtaccaactacatgccagtccccattataggccctcaagttactagtgttctaataaataatttattgaagcccttctcatcctttactaatccgttttaactctaatacaatatgctgagattttactgggacctgaagtgttcagatgtgctacaataaatcaggtttgatttcacttcatgtggatacctggttctagtttttacagcagatctggcctcttgtattggtgggaggatttactgcctatatattttaatttaagggaggcttagtaggcttcctttttctcttgacctcaccctcccagccctctctcaattgttaactgatggtttgaaatgtacatgtgttcattcaagttctaaggttttgttttctattagacacgccatccaacttttattaatattttacttttttacaactctaccatttcctaccccccactcaccccacatcttacctagaatgggttcctatctattccttacagaagccacacacacatatatataatgctacacatatatataatgctgtgccaaggcccagtagataccagtaagtcaaaaagttaaacacaagaagtcaacctcagggaatggggtggctgactgtgcagtgttgtgaaagaggaacacaatcaagaaacgactgtacaattgttattgccaggcttacactactagctgaagtgtgtgaagcagaccaggcaccctctcttcacttgttctctgccatgggaggctgacccacatggactatgccggcgggttttgtcttcagtaggttctcccagaagcaggccctgtgataaggactgtagtgtgtatgatttacttcggggataatcccaggaggcaccaacagagaagcagcaaagtgagacagggaagggactaaatccaataatgagtgtgtaatcaagcaagttctcattgtgggcaactgttgaggatcctgctggaactcagggagatggtgcagggtgaggaagctgctatttcttcatttcttcactaacgtgtatgagttatgggtttcaggtacatcagctttctgatgcatttgctgtgcacatgggccaaacatgcttgtctgctagaaaaacaaaaaacaaaaaacaaaaaaccctcaggccaaatgcctcagagtaaaaagccttccctatttatgtgaatgacaaggggatgtgggcggggctgctacgtagttcaggtgatgagtggcaccagcaggagattcggagagtgggaggagagtgaggtcctgggatgggttctcagagtattgctctcccccgccccacctctcctcttaccctgctttagctgcaccctgaggaagcccacagcttgtgtcagggtgtccttccccctgcaactccatatctggtttccagtaactgctctctgatgttgccccttctgccctggcacgctaaccactctgggatgtcgagagccctgggatactacacaatcccctcttgcttttcttaaaccacacctgcacctttgtaaaaagtcctgttactaaacaatccttgattcacccattaaaatgtcccctttctttcctgcctgatagaagtgatacctttatatctgggtagtctcattaatacctcacaacaatccagttgttattatttttcttcttttgcagaagcacaactctgaagtaagtcacctaaggccacgcagctaggagataaatgaatcaacattgaaacccaattttgttgcttagtatcccacattctcaaactatattatctgtccttattgtgaataaaaagtgttcttattaacactacattcttggctcagtgctaagctctgtggcccattgtccagcacttgaccaggtccccggcaggcactgagccatttgatgcagaggaatgctgagcagcgtgaggccaggcaggcccaactggccaggtgacgcctggccagatggttcctccccccggcgcccccagaggccactattgaaaacctgaaagagacaaaaagcctgtggaatcctccaaggggaccagatgctgcttagggaaaacctctccacactgtggcatcagggaacgggtggtgcaagagaagcttcaagaatgatgaacagaacaagaaactgcctcacttgacaataaaataaatgcccaccacctcctgtttcctcgttaatgattattaaaatgatcctggtacaagattaatattaaaaactgatgcttagtaataaacttctcacagctatcttcaagatttccagggagtaatagctgaaagggaaaactgaacaagaggagtcttcctgtgtgttgtagtgcctgggtgtgtatttctttccactgctagtacttttgttggcaaatagtgcacgctgttggagcctatcccccagaccttaagtaggggcagtgggtcgtgtgggatggagccctatcaaatggggctggactctggttttgtctgctgtgaccccgggggtgcccgctgggatctgtgagcaggcagaggccggtgggagcaccctccgcctccctttgttccgccgggctccagcctgcagcagctgatccggttattatgctcctgaaaagaatttctaggtggccacagtgaccataaggagcagagaaaccacgagggctgcaagccacgaagagcaacacatcggctattgagcactaatcccacccataattagaggatcccttcagccttgtggtgctcacagaaatctgaactaaggcagagaggagccgtctgaggtctgtaggccaccgtttaccaaatgtgctgtcatcagcgcaattagcttatttggtgggatcggcgttttaaaaagaaaaacagaaagctgtatagaacatagacttggggcaaaaactgaatttaagatgtagttaaagtcacctttgatttctcagcttccttcccccaccccattcttaaaatcatgcattttaatgaaaatttgatctgcgtgggtctgatttgtttacttgggactcatccaaatgctgttttgtaagagcgatttcatatctaacagatttgcataacttgggctatacttctcagaaagaaaaactcatgttgggccctaaatgaacagatttatcgctctgagacttgtccaggctttacggtggcagttgctctctgcctactctgctctcccttgtcttcatcccaggcatcccaaggtttctgctatactaaagaaaagctgcgcccatcatctgaatctaaccttcgtgggtgctcaggaacctgtcacctgttctaaaattccacctgctattttaattcaccacatgccgcccgttggctaagtggaagaaaatgaacatctgatcacaaagtcactaattatgtttaattactggctaaaatattaactttcaaaaaggaagataacttttgaaagtgatatgaattcaccactgttgtaatctatttaaattcatgtgttacaaataaattacaagagagaggaagatgatgtatgaatctatataatggtcttcattttttttcgaacctattatcttgtttgattttcctaacaacatcatgaggtacataaaggcagattttctcagtttcctttcataaatgaggaaactgaggtgcacattttccacaaaccacaccaaacacttgggattataacctggatttttaataacttatttgtgtttatttatgagatgaaatcccaagcaagggttcaaggccttaccttagagacccacttgtccaagatccagtaatatctgctcatgtctggtcctgcagattaagaagagagttggagaattctaaatgctaattgtcttaggtaaaactgctgtttccatggtatctgggtgaataaaaatatggaggtgaacttccactactgacccggaaggattttcttcatgaaaagattgtcacaaatccttttggaggctaagaataaaaagtgaagatgtaaatgtgcctctctagaacactgtagtatcaacctgaattaatctctcaagcacatattgcaaacacagctaaccaggccaggaaaaatcatggataagggtcctcttcctaagcaagcatacctcgggccccaatagatgcaaatataagcatggaatttgcaagaacattggagatagaaggactgcaagttttacttgaagcttttttttattaaatagcttgaagcagatatgtaatgcgattggttagcaagcaggcaattttaagtacttattgagtatttcattctgattgagaacaaattggtgttttaacaggatatacccttgaattagaggtagcatataagtagtcaatttacattctgtttataattccaaaccagaaagaaacattgaataaagatacgtttaccacatttggcttcaccatgcaaaggtcccgttgaatagcaaaagatttgcacatatttaaattagatttcacacaatctgtaaaatgacaaagtattagggaggattagcctaattaaatgagattgtgagaaagcctcaaagagatccaaagtgcagataccttccaagtaggatcacagtgaaggcttccagaatctattttgcctctttcccagcaatcagggctcagattaccctgggcgacagtagcacacttgtgtatgcagtgacatctagtgacaaagaaaataaaaccggctccaaggacactttcttcaccagacagactccacaaaaatgacgcagtacctatcattactgtagattcgtgcatagtatcctatagagattgcaaaagagatacaccagtttctacaccagatatgttcaaagaggtaatacaagaagtatcagtaaggtttggcaaacagccgtggtatcagaatccaaacaggtaattaaaacagatttatttctgtcttatgtgcccatagtaaaaactgctgttaatgatttggacacagagttcgtgtggaatgttctgaagaaccactgacatcttccaagaaaagaatccattaagatgaatagaatttgctacttgaaattcatgtccaaaagtttagaaaatatacatatgcaagttactcaggcaagacaaagatttaaccaactctccaagttatcttaatcaagctgaaacccactttagattaattggagtaggccataataaaatatttcctgtttccttttgtcagattttaggattttaagcaaaatgaataaaatatatacaaaatcacaactttctctgtataacaggaacttggggtcttgtcttcgtagagttagaagaaagtgaaatctacagatgttaactagctacactggaggcaggttagtgctgtcccgctgaggactccagtttttaatcaccatcctcaccccacaggacctttcaggaggcagtgatagtgcagcctacacctggaggtctctcagattctggtgatcttcagtgaggccttggagtcggaattttgagcaaacgcccaggtgattcttatgcaattctgccatatcctaccttttcttatatgctccagtgcaaaagtaaaaataccacttgggatatggagagggtttaaactttgtaaaggtatccacagttgcctgggactcggactgtaagtaaaccatgaaccagtttatccatgtgtggctacaacattattaaaaacagtgtaattgccagtatattctcaaaatgggttgcaaagtggctgaaaaaaataactggttttggccgggctcagtgtctcatgcctgtaatcccagcactttgggagaatgatgtgggtggataacctgaggtcaagagatcaagaccagcctggccaacgtggtgaaaccctgtctctactaaaaatacaaaaatcagccaggtgtggtggcgggcacctgtactctcagctactcgtgaggctgaggcaggagaatcgcttgaacccgggacacagaggttgcagtgagccaagatcacgccactgcactctagcctgggtgacagagcgagactccacctcaaaaacaacaacaaaaactggtttcctttttttctccctccctccctcccttccttacttccctccctctctcccttccttacctccctccctcttctcttccctccctcccctcctccttgcttccttccttcctcccttctctccctccctccctcctttctttccctcccttcctttctttctttcttgcttcctttcttccttccttccttcttttttcttttttctccttccttcctttcttctttcctttcttccttggttccttctttctttccttccttcttctctttgtccctccctttctccctcctttgtctgtctttctctctctctctctttctgtcgctctctttctttttctttcttctctctttcttttcttttcttcttccttcctttcttgtttcttttcttcctcgctcccttccttctttccatcttctctctctccctccctcctttcctctctcctttgtctgtctttctctctctctctttctttctctctctctttttttcttttttctctttctctcatctttcttttcttctttcttttttcttttttaatgattgtcatttctatattcagggctctctttcttttcccccatggaaaaattaagtctataagcaataaactcttttaaacaaattaggcttaaagttgtatctttaaaatactagctatatagcatggcttagccctgatgaaggcattctgagtttttctgaattattgattgtggattcaatgcttggaaatttagtaattgctgatatagcaagggagcctgcatgtaaagaattctcagtaaattctttagtcgagttgtacaaagaaataaccaacacatttataaaaatcccacattgtcacaaagtaaattattagttgattattctccttatacaaatttgtatacatatatatatggtttatttaaagctggcaattcatgtggacatttataataaaaactatgtttctgttgcatttagacattcatttacactctgccttagaatttagatttcagggcttgctgtttttgtttgaattaaggttgtttttttttttttttctcatttgtattggtttctcaatgtctttcctttgaggttttgaacgtaaactaacattgccaggtgactttttcacatataattctactatctgaaagacctgggaaaagctctttgacattgattttctactgaatggagatttgagctggggtctgcagagcctcagggatctggggcatgcttcaggtgctgcagggagtagggggtgggtggaagaagtttggggctgccccagagtcccctcaagcagagtcttggaatttaatttatgaattttgactcaaaaaaaggtttcttccactttaactacatttgcaaaatactaatttggaggttttcttgaaaaattatcacccctcccactaccctccactacttcgtttcctttttattagctcattggtttagttttgtcccgggaccagttgttaaaagctttcacagatccacaattccagacactgtgtgtggagactggaacgacttaacccataatgccctatgctcagctgagacccagtaatgccctgtgctcagctcagaggcttgtttgtccccactctgtagtttccatatgggttactgggacctcctactctattttattttattttattttattttattttattttattttattttattttattttattttattttactttattttactttattttactttgttttattttattttattttattttactttattttattttattttgaaggcaagctgctttaatgatagcaggccattcactccactgcttaagtataaccctgcaacaagaaagtgctgttaaaacattgtttaaatcatgcactttctctcctcaaaaattcttattggctcctcagttagaaattcaaattccttcataatttgacaattatttaggtctccattagcatttttttactctatcctgacatccaccttgcccttaatttacatcggactatttgtgaaccaatcatttatttttacatctctgcacttggctccatcttgtcttttaactgggcttccctctgcccatgcaaatccctttgtaaaacctccacttttgcctcaaaacacactcaagtggcacctgctatgtgcaggatctcctccagcacctcatatcctccccaagtttaatttcctcttgcccaaatgttcagctctcctccacctccctggttactcctctgtctctggcatcgtttcccccacctgtgatgtcacagtctcccaggactctgtccttggcctcttccttctctcccttgctcatctcacccagtcacatgtgtttaaatacccacattttcatttccagctgaaacctctctctccttgacacttcactcagagatttaacagacgtttcacatttcacatgtccaaaaatagacctgatcatccctaccccacttgctccctcctaattttcccatctcattgatgacttcatcgttccaattattcaggctaaaacccttgaagaataaatacctcaaaccccctcctcctctcatagctcaccacgtccagtctgtatgaaaaccattggtgctttccatttcaaaatatccagtatccatcatttttcatgacctctgctgtcacctccctggtccaacccccatctttctcatctggatcattataataggtttctaagtggtcttcatttcttcccttattcccctttagtgtacccctagccaagtaggcagagagatccatttaacatatgagttcgatcatatagctcttcttcttaaaagtccacaggaattcttcatttcactcagaaaaaaggccaccatccttgggcctcagggcctcagggccccatgtagcctggtgcacttctatgacatcctctatcccctactctctgctgtagccaacctggctggcccccttgctcttttgcaaatatgccagtcattctcccactaaggacttttgcactagttctgtttgcctaaaatattttttctcacaaacagccgcttggataactccctcacttccatggcttcactcaaatatcaccttctctgtgaggcttgctcatatcaccctatgtagcactgcaagttgccaccacctacaaaacagacctcctgatcctccttaccctggtcttgtttgcttgttttcatgccactttatcagtctctaatatgctatcattaatcatctatctatccatctacctagctatccatctacttatttattgttgctggaacctgagttgggatggcttagataattacagatgcctggaatgtctaccctggggccatgccttgagcctcatttctggctgtcactgagtttcctcttttcttctccgtgaagtatcttctagaggttgaatattcaaaacagctgtcctgctcacatttctgacacctaaactgggatggctgaactattgggagcttgctgggggtcccttttttccagccccttctccatatggctagtatgagtttcctcccagcatggcagtctcatggtagttttccttgttacctggaagctcaggatcccccatcagtgagagcttcaagtgccctttgcagaggctgccaggctcctcctgacctgcctctaacagtccatggcatccccttgcaccacactgaattggtcccaaatcaatcatgtaatgcaaagtttgtaagattcattcatattctagtatgtctcagtacttcatttctttttattggtgaataatattccattgtatggatacgccatgatttgttattccatttttctgttgatgctcacttgcattgtttctagcttttggttgtgagcagactggtggttgtcaggggctggagaaggggtaagaggaaatagaaataactgcttaatgggtaggggctttccttttgggggtgaagaaattcttttggaactagatggggtaatgattgcacaacattgtgaaagtactaattactcacttttaaatggtcaattttaattcatgtgaatttcactacaataaaaagagaaaaatagtcagttacaaatcagcccagattgaagaaaagaggactactcagggtataaataaatacttcgtggtctcacaaacagccacttgggtaaatcctcacctccatggcttcactcaaatattagtttctttgtgaggcttgctcagatcaccctatatagcactaaaagttgccaccacctgcagcacagccctcctgatcctctcttgtatatacaagcatgtatacacaagtgtatatatccacgcttgtatatacaagcatgggggcgaggagctctgcctatttgtggaatggttgcattctatgtttttatcttagttcctcatgtgaaggtgattttccccactagcctctctcacaacattaaaaaaaaaataaggggctgggcacggtggctcacgcctgtaatcccagcactttgtgaggccaagttgagcagaacacaaggtcaggatatcgagaccatcatggccaacatggtgaaaccccatctctactaaaaatacaaaaattagcttgctgtggtggcacatgcctgtaatcccagttacactggaggctgaggcaggagaatcgcttgaacctgggaggcagagattgcagtgagccaagatggtgccactgcagtccagcctggtgacagagtgggaaaaaaaaagaaaacaagatatcatagcattatttctcataaaactaatatagtacttggtaggtattatggactcagttaatcatttttattcaatgcctacggttttgttccaaaaaatctttatgagttggttgtttgatactcagtgtctgtttttctttaggaacattggaagcagtagttaagattctattgtagtgtagtaacaagagtactagctttgtagtcagtacccctctcagaaaactatgtgccagatactgttttaagcttttcatatattatttaatcctcagagcaacactgtgaggaagttactgttctgtattcattttatagatgaagaaactaaggcatagaggagtcaggtaacttgcctaagttacattatgtgtagtaaagatattaggattcaaactcagacaggatagcttcatagtcatgctcttatcctctctgccacaggcctcttagctttgatgtgtaaactcctaacccctagtttctttattggaaaaatgggaataatcttcttcccaatgttacttttggttttaaattaagatatgtattggaaaatgttttgcaaactttaaaacagtgtataactcttgctttaatgcattcctccattttttccatttgttcaagcatattaattgaataattacttcagatgaaataagattgagttcttgctttcaaaaagaacgctgtctactaaagagacagataattaaacaactagttgtactacagagtgatgaactttctacagtaagaaaatggtagaggggattggaggtttgcgcccaagtccattattgaacctcgccagagatatgtaattaaaataattctaaaatatattttgtaagtaacaaaatatttttaaaattatttagctataagatgaatggtttgttagtagtttctatttgggttcccatcttcttacgggacctatattttgaaaggcaaagaaatctgtgggttgactgcatttggaaaatttcccaagtcagcataattcacagatgaacctgtcagggaccaaaacaacatccccaaatgaatataactcaaattattttgaaggtttagtctttacctgtgtactatgcacatggcatatgatgtttattggctttactttgatctactttaatcctgtttttttcctaaaataaattctcgctttagggtaatgtggcttactgacacacttcctatgcactatgtacacaactactgcacctgtttaaatcattctttttaatgggatgcatcctggagttctgaaacggatcatttgatgggattgctagaatgtttgcttccactgaacattttcaacttaagcccttaaaagaaaaacgtttttataacaaagtaatctaaggtaattgtaattttatttgattgactgtgtttagtccaaataaaattggtctggtgttctatcaaccatcaagtaaaataggcgggataaaattattcttctcataatgaaataaaagcatgtgcaaagagaaatgctgacgtagggactataaaaggcatttcaaaaaatgatagaaatactgagttgctgaaaaaagcatttcttatgtttgcattataaggctagtcacttgagcttttgggaatagatatgtcttagaagccgcagtcacattgttagggatcctgggatggctgcctttaatgatttaaaaactcaacaggaaataattgcttcaaaaaattctgtatgctgttcaacccaagagggaccctggccaaattcttattcttgggactttcttggaaatggattaaggaagatgatgaataacattgatctttgcttcctgctccaggtatgaaaggcgagagcagtcttgaagggtagaggaagctgcagggcatctgtgaagggggagtgtggaaaggggaatggtgggcatacaatcagtcccctcctctgtacactcagcagataactggaaagtgctcaaactagttcggggatgtcttctgtttagattgctcagtggggatacccctcagtggggtttgtcagattttcatggtgattttaataatgcactagaatagtaacttggacaaatcttgaggaatatctgtgtttagcagaatgtgtatatttacacagagagacacccatgctgcaaagtttcttatgactgcacctgcagggttgtttatatttgtagatcttcttaatggagaattaaactgaaccaatggcaagcagtgaagcatacaacaaaagcaaaaataaacaaatagaactgcatcaaaccaaaaagcttctccacaacaaaggaagcaattagcagagtaacaaaatgatctacaaaatgggagaaaatatttgtaaaatacacataggataagggttcatcttcaaaatatagggggaacacaaacaatttaataccaagaaaacaacccaattaaaagatggaaaaaggacctgaatagatatttcttagaagaagacaagcaaatggccaacaggtatatgaaaaagagtgcaatatgatttaatagtcatcagagaaattcagattaaatgcacagtgagatatgactttacactgttagaagggctatgatcaaaaagacaaaaaataggctgggtgcagtggctcatgcctgtaatcccagcactttgggaggccaaggcaggtggatcacctgagatcaggaatctgagatcagcctggccaacatggcaaaaccccatctctactaaaaatacaaaaattagccaggcgaggtggtacacatctgtaatcccaactactccagaggctgagacaggaggatggcttgaacatgggaggtagaggctgcagtgagccgagatcgtgccaacacactccagcctgggcaacagtgtggagaaaagggaacccttgcacattgttggtgggaatctaaattagtacaactgttatggaaaacagtatggcagtttctcaaaaaattaaaaatagaactaccatatgatccagcaatccaattctgggtgtatatccaacacaaatgaaatcgttatgttgaggaaatacctgctctcccatgttcattgcagcattatttgcaataaccaagatgacaattcaatctaagtgttcactgagagacaagtgaatagattcatgcagtggataatattattcaacctttaaagagaaggaaattctgacatttgtgacaacatggataaacatggagaacactattaacaaaagatgccaggcacagaaagccaaatactgcttaatctcacatgtggaatttttaaaagttgaagagtagaacgatggttgccaggggctggaggagggatggggtcaaatgttggtcgaagggtacaaaattttagttatgcagcataaataagttctggagatctattgcacagcatggtgactatagttaataataatgtaatgataatgtataaaatattatgtacttgaaaattgccaagatagtacagctaaatgttctcaccactcacacaaagataactatgtgaggtgacatgatagatatgttaatcaggtgatagattaatagattgatggtggcaatcattttgcaatgtataatgtgtcaaaactatcacattgtacactgtaaatatatgcaattcttattcatcaattatacctgaaaaatgtggaaaaaataaattaaagagtagaaagcaatgaagtaaagatcattcattactttaatgttgccatatgtgaagatgaggctgaagtttcacaccgcgtggggcagacatgaaacatttgtacccacatttttggtatacaatcaggaagtgcgaaaaacagaaggggggattgtgtagatatttcggacatatgtcatctacataaactattgttttattcaaattaatttaaactagcagcatttctatcaatttccttaaaacaattcaaaattcactttcttgagtagcctttctgtattgcattaattcaaagttcatgatgccctcaatttcatctttgatgtctgatgtcattataactgtacagtaataggattaattatatcaacaggcatacctacataaaagttttccccttcatatctggtgtcttaagaggctttcccggtcatcttacaatgcactgaatcattcatcgaagagtctgggggattctagttagcatatttcatgcatgtatttgacttcctttaatggtagaaactatgagttgatatattactaacaattacaatccattcagggtcaaatccaatgaatacaataaatcagcaacccgtggatatacctgaatttataaataaatatgacttgatttctaggacataatagataatttaatatagcaatctaatttcactttatttgaaaaccctacaaaaagcctaaaaatgtatttaatttaagatcaaatttgctcaaaaaggagaacaaaatttattctatcctatctatctagccactacaaaataaattcactcaggaaaaatattactttggaatgcaatgttagatagttggagaaagtgccttcactttttagattaagtgtaaaattttatattaagagagaagcaaaatgaagttacacacagggaaggtaaacgattttaaatcaatgtttttagcctttagtcactggttttggagatgtgtccagactgtttttctaagatgtttgaaacagagtttgatatgttaaatttaagaacaatgtatctcaatcaatatttagaactctggggaacaaatttgttcaatttataatacttttactctttatattgtatgtcaatgaatagagaaatgaaactttgtcctcaattaacaaattagatattgaaaacacatcatactgataataatgatgttaaaatattgccttgaaatgatgtcatagattttaatataatagtaatgccaacaattatagtgatgaaaataagcttaaagtatttgctcatttcctttgcagcaggcaaatgggtcatgaatccccaaaacatcttaagcagcaataacatatctgtaatgggagcagaagctccaaaacaacctgttttgaaggacagccttcctgggtccatattaactctgttgtttgattataaaaaattagagtcatatcactttctagttacatttcatgggaaatttctacatatttttatcttgattacacttaccatcacgacaatttattcaacttcctttcctatttctaggccaggggctgctcttgaagaatcttttgaatcctccaaccctgatccaaaatagcatgtacttttgaagatacttatgctattctgagagcacattttaatcagatgttaattcattgctttccacttgtggccttgacctatcatacaaagatgagctttggttattttgttttctgatcacccaacttctatgtcttattcggcagacctggagaggcagtaaagttcccatggggtgctttctttctgggagccccctgacctcctcagcttttggttcagatgaatacttctttagtgtgactgaatgtcaccatccctccactcaactgttccatactttgtacttgataagagtttgttcccgactgtaacacaaatagtaatataagggggtttctgctgagggaagaggtcacatgctctctctgaagtgtgggagtggagaggagagaacagctgcttgggaacagctttcataataatccctggacggcaatgccaggagccatctggtgtcccattggccatcagcacgccctttaattttaccaatggccttgatttcctgtgactttttttcatatatattttgaaatatttcaaacatatacaaaattactgaatatagtacaatgatgttttataaatccactattcacattcaaacattattaacaattggttcatttattttatttataatcaaatatattttaaatcaatgttcattcaccttggcatttctaaaattatgaactttgtaaaaaacattacccgtgtactatctgtcatgcctgatgaaactagcaattactgtctttattggtattatctaatacccaaaacatattcactttttccttatgtctcacaaaatgtcattttgcagtctgtgtgattatatcaagatccaaacagggtttatacatgacatttggttgtttattcatctatagtagtactcactatattttttaatatcaatggcttgcagacactgtcattcccgtatagattttaacattctggaattgtctctttacttgcttgtaggttgtctatgtttctccatttcctgtgttttctatgaagatatagcactatgtattagttctagaggtttgattagattcaggtctaaactgttttggcaaaaactctttctttgctgttgtcatgtgcttcaccaacatgaagcacatcagaaggcactcattgcttgtcacacatttggtgatgctaagtgggtgaacacattgctatgtttgtcatctcttcaaggactttgcagtagaaagtgattttttatcctgaagatattagatgcaatataactgcattttcccaatgtattatttgcattctgctcttcataaactggtctttttctttcaatatagtcaatattttacctggcataaagtgaccatctcacctgataggtgccggctatccctttacaatagattttagttaagtacactgtgttttacagaaaagagctgaaattcagttgcatgactatagcccaatactctaagggaatgcagataacactctgcaatattcattaaaactgtgatggcagctgctcactctcagtgaacaattctactcagcataattgaaattctgtaaaatagcaggactgcattgaattaaccctgagtcatgagtttccatctcatttcagttagattagaaaaggaaaacgtgttccttacatccatcaggaaagacattactatgggattaggactgagatagaagaggctaaatgaatgtttatcaccaacaaaatagttgtactcactgtttttagcatgttttagagcacaatttttaataataaacttgtttttctttcagagttgagaaaccaagattttagatgccctaatggatataattattctaataaatataaaagatttgggcaaaatttcagttataatgtattgaattttcagtttccaattatgataaatagtttcactagagatgaatcagaggatggaggtcacagttgctgaaatagaattttgctgataaatctccttttctctttctattagtttattggtttgtttagttatcaatgaatactctaaaaaatttagccccttgaatcaccagtagcaacattcctagagcttagtagaaatggtaaaacctgggccccaccttagacctaccgactcagaatctctggggccaccccagagacttttagcaagccttccagatgattctcatacacacgaaagtttaagaagcacagctttaaataacacagcacacagggatgagcattctgagagtgattagggtgacagagaaggcacacaaaaggattcctggcaaattagatggatccttgtgacctgatgaccataataatccatctggaacaactttgcttgatagattgcatgttgaggagtagagtcccactagggcattgatcaatggttctgttttggtcctcattctctaagtttaaggcaatgatcaatggttcagtttgggtccacattctctaagtttggcactaaaaatcctatgtccctggaaatctctcagttccaggcaaagtaaggtcattggtcaccctaaccatcatgaggccagcaagccaatgtcccaataaatgaaacaagggctcttaaagtctcctgcttcctccctgatgttataacattggctttgtgaaatgtcacaaggaaactgggtggccagatgaagttttatatggaaaatgtggtaacttccagcttactatgtaaacaactttaggctcatttcactaatttttgtattcagtaatggttaagaatatgactgccccaggcttcagcattagaattttgtttcttttattttctagctgtgtggactctgacagacaaatcaacatcctagtgtctccatttcttcatctgtggaatgggaatactaaagtacccattcataatgttattggagtataaaatgaattccatatttagaacagtcctggtagacaattaattttacatattattactagtaaccagggaactaatattgtacactcatcaactttgaaagtgacatgtagcactgaaacatcttgaggacttcatttagtttgagaatcaaagagacactttggtcaagagagcaagtatgttcagtttgcatttcatgtccaatcaattggtggtggccagctggaatacaatgttcagaagtattctgaagctgcatctgatattgtcaggaaagagtaatgcttttgattcatgttgtctctgtgaaatagtgtgcagaaggaatgttatttaattgccaatgttatggtcaagtatcaaggaaaacttggcagaatatctagacgtgtagattgttaagagttgttctatgtcatatcatagctgtatatcataaaggtttcagagagatataccagactggttccttaagtatatgtttgatattatattattaaaattatatttgcattttccatacttatgcatttaggtgaaatgaatcatgagcttatgtatattataaccaaaattcattttggacttctcaattattgagtttgagtcaaacatacagagatgtatagtattttgcttgtgattatatgaaatatacacatacatacatacatacatacatacatattttgaaagagttgaaataattaaaataattgatatttgtatttgtttaaaattattgactcacactgcagtcttatccatttatagcttagagttctttattatgcatgcagtagtagaaaaaataaacatcgttcatactttcatggaaataagggtctaatgtaaaagcttgacaacaaataaaatgtcatactgatagctgtataatgacaatcagagttgattgctgtgggaagacaattctctattggtctcttgtgtttctgcatgccttgtgagcaagggcactgactgtccttttctctggactatctcttcaggattgtttgtatagtgaacagctttgggaggtagtgtccccctctagacaaaagcacaggcacactgtccagtgtaataaagagaatgtctcctggaagaaagagcaagcaagcctttgtccactataaaacattcaggctccctaagctcagggctccccttctgtaatgcagcacactgagtgtttgtttggatgtcacctggctctctttgtatctccctttaggagctgggattcagaaaaaccatgcaaaaatactaatattctggctattgctatgactgtgagtaaagaactgttctgtagctcttatgcaggagtagattgtagactcttctatcagcatctgtaacactgttgcacactaaattgtttgcttgcatctaggataaaatctgatttttaccttaggtttaatggacactctctctctctctctgtctctctctctgtctttctctcagtaacaagattaaatgtgggataatttctgcacaagagcttgtaaacattatacatttcactcataatatgaaattcatatttctgagaaagataattgttatttgcaagtaaattacatcttggtgtgactcacttgcaaataacacttaccagaaaaacattttttattcctacaagtatcttcaataaaagattaaaaagatgagtaaatatatgtagagcttcaagaagtttcaggcctatacagaagaatttgaccaagaaagttctggaacatccatagttaatggaaaaataactgagcagcagccattctctgctgttcctgattttaatgaggaggcctctggtgtttcactgttatatattgaactggctctataatttagatttatatctttaatcaagttgaacaagaaccattctagttgctagtttgctgttattaaaaatgggtattaaagcttattaaatatctttccagcagctattgtggtggcctctttccttcaatcacttaataatataatacattatactaatagatttttctaatattaaaacttctttgcatttccatttgtcactgcaaaccattatcatatcctgttgaattaaatttacaacttttttccagtattttatatttgttcctatactcctttgtagactccactatgaaaaatgaaacatttgtttatacttccttcaatttgacctcctcatttccgtttgttaatttgtttattttttattctccaaacggttaccttagtaattgtacaactatggaaagtcaaaaagagaactaaattgagagtcaggaggaccaggttgtaaatagagaaagatgctctctgttcgtgacctgcatttaagctaacttcttctaaaatatattttttttcttttgtattctacagttgtactttgaagactctaggtatgtcttggaatcctctgtggtctattttcaaatttaccagatacttttatgtaagcttttaagcttcactcatgttttaaatttggtcttttatttctttagatacaaatactttgcattctgtattttacatttggtaaatccaacttctaccttctttgtgggtctgatactaaagttgttttgatttctctttctcacaaggtattgttcccgtgggtgctttaagatggtgtgtgtatatgtgtgtgttgggatggtgtgtgtatgtgtgtgtgttgggatgttgtgtatgtgtgtgtgttgggatgttttgtgtatgtgtgtttgtatgtgtgtgtgtgtgagagagagagaataaatattgaaaatttccctgtggaaattctttgaggaaatatttatgcttacttcttcagcgcttgggggcatcaagtatccataaagcccttaaaattattattcttggctgggcatggtggctcacatctgtaatcccagggctttgggagactgaggcaggaggatttcttcacttgggcccagcagtttgagaccagactaggcaatatagtgagaccctatctctacacatacacacaaacacacatacacaaatagtcaggcgtggtggtgcatgcctgtagtaccagttactcagaaggctgaggtagtaagacagcttgagcctaggagttcaaggctgcagtggattactatagtgccactgcactccagccaaaaacaaaacaaaaaaatcattaagtgtgtgtgtgtgtgtcgtgatttcaagactattctttttaatatcattgcagaactcttggtcactcactttcctcccccatcttgccatatgattgcatttgtgattggtggtggtagtttgttttgtatctgtaggtgtctttatttctacacatcttctctgccacttcacactaacagatgtggctcaagatgcaacaaaccttgctgctccttacagtagagggggctttagtatggactttctgtctgtagatgccacttttaggtaaccattttgtgtagacctgtttttcaactcttggctttttttctaaaccagatttctttttcattgcacttttcaagccttctttcataaactgtggtctgagattttgctgcttactaacttctttgaaggtgtagttttctataatattatcatcatcatcattattatttttatgtttatttcaggaaattgagaggggcagagatgccttcaacaaaggatcttcagctgaaatttggcttagataagcttcatcagacaatgatacaaatttctgagctcagaattgaaattgggtcagtgaatgttggaagttatatagagtagtactcagtttaactttccaataattcattgtattattctacatcaacaactccctagggtttcaatactatctaaatcacatctttcaatctctctgcagatctgcaattctgtgacaatttataatgattatgcaaataagtttattaattataattgctattatgccagaaaaccaaattcagctgatgtttggaaacttctgatcatctgaatgtaaaaatggatttgacagttttgtaatatttgaatttattggatgtctacaacttggataatgtgggcggtaaagacatagcttgtgggaagagcacagtctaccagcttttctgtatctctggggattccaaatttcaaaatattttattatttagatgaaaaaattaaaaattgattatgctaatattgaatgtgaaattataaattgctttggataattttgagtttcttaaaattattgaactattttaatttgtgcccatattgagttttgtaaactcaccacctctcatgataaaattaagtacctaaagtcctgtaattataggtgttcagacacataaatgagcctggatcactcaacccggttttcagcatgcaattgcatttgtcattcatcatggttcataggcacaagcaagctcaatacaaaagccaccctgcattattgtccatccagttttctctctcctggtgttgttaaagatacccctttgtcctcacctgcaattagaagacagaaggattcagagaacaagagtgaattaaaacagggtcatcatgggagtaattaaatcctctgtatgttagagaaccaatcataaactctggttttgcccccatagaaccaattgtggttttcattaaacagagttcagaaatcaacttttgagggaccctttcacatattttctgcttcagcatgtctatctgaatgctgtatatccttaagctaatgggttctcctgtgtgattctggatttatgaatgtgaatgccaagttgaaaaattagtttgaactaagtgaatcagtaccatgtgggtgttcagacaagaaacaaactttaaatttctagattctatgtatgttcttccagtgccctcattgcgaagtattgactaagtcaactaattacactgtgcctcggtgtccctgaagtgatctgtgatcttttctgtcttctgaggcaatgcatcttgaactgtgaactttagtgtgcacacagatcacctgaggatcttaataaaatgatgattctgattcagtcggtttgggggtgggcctgagattctaaattgactaactaacttccagaagatactagagctatggtgttcaggtcccactttaagtaacaagatcttagagctgtatgtccagtatggcagccactgcctcacatgtagctattgactgctataaatgtggctagtgagataaaggaatatgttttaaatttaatttaaatttattttaaatttaaaaataatacttgattcagttatcagaaaactatgtttaaaaccacttggatatgtgaatctatcttttcaaccatacactgtatgatgtgtaaatatagatcaagtagtattgataaaaatttaatatctgaatagatatttgctgtaatcataaattatgtaacaggtttagaagacagtacaaaaaaagaatgaaatatgtcatcaatattttctattgataacatgttgtaatggtattttgactatactgagttaagtatattattaaattagttttgtgtgtttcttcttacatttcaaaaatgtagccactaaaaagtttaaatattttatatatatatacatatatatagtcatattgtatttccagtggagagtgttggtctagagggttgtcctcagcccttaattctaacatagctcagttattcataaggtcaggtccctaaaacctgcagaaacagtcctcaaacagtgtctcttcttttctttttccttaatctattttccttttctcccagcaccattttgattctctcttcccctgtattctctctctctctttctcaataactgcatatcatcctggagtcttctttctcagtcatcttttcagccaatcagttctctgtagatttcgcctcattaatttctcttttcccatacctacctccatcacaggcatttaggtcctcattagtttctcattccactgggctgtcttctcactccattcatctcctcacctggtctgtcttttttcctagtacttgagtaagtaaaaaacaaaaaacctaagtattttatttatctttttaacaccctccaataaattcacatatgctttctggaggaaattaaaattctagatcaacataagaggccctaaatgttctatctctgctttctttccagactctgtcctcttctccaccccctaccacgtatcttgtatccagtcacactgaatgacttgtagcatccattgtgtgacatgggatgtctggtttggtgtcttcacacatgcctgttcctggtatgttcttccccttgtgaagtcctgctcatctttcaacactcagcccatgtcactttctctacatctgcttttcatgttgatttaaatgcccttcatttgtgcatttctctcactgtaacatgtacatagttttgtttcttccaaccattatttttaactctattctattgaaaacaaaacaatgctgaaataatttactattttgatatgactaaccttcagatatttggagttagttctctgacttccttggctcatttattctccagaattaacagaatcctacagctttctaggactcatagaattaagaatactttccctccttgagcaagaccatactttcatttttcctcgtgttaaaaagattaaaattacagacctaaaaggcaaagcctgccatagaaaatacaatgctgggcaacgttttggtattatcctccctgaccctgccttctgcttgaagaaggaatttcccaattgcttaagcagatctggactcaagctggtgaggctcacccagcaatggggctcccaacaaagtcattttccatgagaccctgaccaatgtgagctctgggcaccaaatgaaagtaaatgaggtcttctgatcccccttcgttatttaactcagggaaaaaaatatagactcatgatgacaaacaattaaaactccattactttgtggacctatggagacatctaaccaaaattgtattacctcacatggggcagtggaagataggtttttaggtttttctttcttctgttacagaaatattaaaatccaataagactgatgtattgcttgaagtcagcagtttgagaccagtctggccaacatggtgaaaccatgtctctactaaaaatacaaaaattagctgggcgtggtggtgggcacctgtaatcccagctaccccagaggctgagacaagaggatcacttgaacccgggaggtgaggttgcagtgaaccaaaatcgccccactacactctagcctgggtgacaaagcaagactctctcaaaaaaaaaaaaatccaataagattgatatttaagaaaagaggaaataaagagctaatttgcagatatttcttacaaatatgtggatttgaaggggctcaaagaccctagcatagataatagaaaatggtgatcacgagtaactctgatttccttaagtaggagggcttgggttgtcttaggttgggtcctctagaagcagagcctgagaaagagattcatgtgcaggtggtttattaagggagcctgggatagaagaaaaagctaagcaagaatgtggtatcagctgtaatctggcttctgcctgatcccatggggagctctggagcatgaagagcaagcagaactgtctcaccttgaggcaaaggagctgacagtcatatgctgcaaactgtcctcagaggaaagggtaacatttcctgggggcatggctagatgctttcagcagttgataagtacttggagagggagcagtggtgagcctattgcagcactaggtagatgagtgttcaggcctgataaatggatctgtgtggggaatctgaagtgtctgctacatgaatgcgtcagaagggaggatgttctcccataaaaccaacttctctaatgacagtttccagttttaggaacatgcaatttatctttatttcactgaatatctctagttaagtatggcattcagaattgaaccaaataatctagatcaagtttgattattaaacattgtagtgaaacttaacctcatttgttgagtcttagtgagagaagacagccccaagatcaggtataggcactgctggaaggtattggcacaggtatggagggcactgctaaggtacctagaccatagtcctgataaagagtacaaagaactgtaaagaaagaggcatgatataatggaaattgatttttgtaagtgacaaaatctaaaaagaatcattcttgagagtggggtaagaccaacagaggtcccaggcaaatgggaataatttaatgtctaaaggtggtgattcaagggatgggggaagaacccttaacactgttaagattctaaataatcacttcattcagagtcaagcctatctatttcctgggaacaaagaagtagattccaggattgcaagaaagggcttgaaagaactaagtattgcatcagcaccttagacaaggagcctgatgaaaaggcctcctggtaacacaaggaacagaaggctaagtggcaaataaaggtttaagcttaataatccaaattagaccaaccaacactgcagagttggagaaatatgtagttggaggactaactgtgtaccagggtcagagaacagcaatgaattccagacaacctgcatgtgaaattcctaattaattacatcggagaaaaacatgggcaaggcagagaggtacccattggaaatcagtggttctcaaactggagcatgaatcagaataacctggagagtttgttaaacaaagatttgtaagggtcccagatattctgattacatctaagatagatcaacagcagaatacacattccttttaggtgtacattggcccatcagcaggagagaccatttgttaggctataaaacaagtctcagtaaattcaaaagaagtgaaatcatatgaagtatgttttctgaccaaactggaataaaattaaaagccaataagagaaaaaaatttgagaagtttacaaacatttggaaattagacaaaacagtatttaaaacaaatcaattctataggtcaaaaaagaaattacaggaaaattagaaaatgatttgaggtgaatgaaaatgaaagcacaacatacaaaatgtgtggcatacaaataacacagtgctcaggaatgtatatacagctataagaacttatattttttgaaaaaagaaatacctcaaattagtcatataaacttctaccttaagaaactagaaagaaagagcaaactatacccaaagcaggtaaaagggagagaatagtaaagcttaagaaaataaatgaaatttaaaaaaaaatcaaagttgtgcgttttttctttttttgaaaataacaaaattcatatacctttagctacactgacaaggaagaaaaagactcaagttactaaaatcagaatgaaagagggaatatcactacagaccttacaaaaataatgattataagagaatactgtggacaactgtgtgtcaacaaactaggtaacagattaaatggacagttttccagacagacacacactacaaaaatttactaaagagaaaataaataatatatatcgatatactttacttgttggtataccttgtaaagagtaaagaaattgtgttagtaatttggaatcttcctacaaagaaaatccaggtctggataacttcattggttaagtctatcaaacattaaagaattagcaccaatccttcacaaacttcccataaaatagaagacagagaacaaacactttctaatttatccaataatgccactattacaaagatacccaaaccagacaaagatagcataagaaaactacagaccaatatctcttttgaatagagacataaaaatcttcataaacttataagccaactggatccagcaacaataaaaaagactatatcataagaaattagatttaactcaggaatacaagtttggtttagtatttcaaaataaaacaatataatacacaatattaacaaaataatgggcaaaaaccacatgatcatctcaaatacaggaagaaaaaaattgacaatatccagtgctctcacataataatttttttaaaaactcaattaactaggaatagaagagaactctctcagtctgataaagggcattgtattagtccattctcacactgctataaagaaatatctgagattgggtaattaataaagaaaagaggtttaattgactcacagttccaaatgactgaggaggcctcaggaaacctacaatcatggcggaagaggaagcaaagcacgacttacatcacagcaggaggtggggaagaaatgccacttttaaatcatcagatgtcatgagaactcactatcatgaaaacagcatggaggaaacagctcccatgatccaattgcctctcaccaccaggtccctccctcaacacatgggaattacaatcaagaggacatttgggtagggacacagagccaaatcatatcagacacctgtgaataacccgtggctaatataatattgaatagtgaaaaattgaatgctttcttcctaagatgaggaataagacaaggatgcctactttcaccacttctagtctatattttactggatatataagaaagacaattaggcaagaaaaggaaatgaaagatatcctgattggagaggaaagtaaaactatctctatttttgtgtgtcatgattttgtatatggaaaatcctaagaaacccaccaaaaattattgtaactaatgtatgagtttagcaaggatgtatgatacaatattaatataaaaattacttttctatgcaataccaatgaacaatttagaaatgaaatcatgaaaataaagcaatttttaaaaaatattaaaatacaaataaatttaacaactaaaatacaaatacaacgagtgcaagacttgtacattacaaaatctaaaacattgttgaaaactattaaagatttaagtaaattgaagacaccctaagttcaaggattgaaagacaatattgttaatacagcaatgctccccaaattgatccaaagcttcaatgcaaactctatcagaacactagttggcttttaagaataatttgacaagctggccctaaaattcatacggaaatgcaaagtatctggaataggagaaacaatcttgaaaaagaagaaaaagattggaagactcacacttcataattccaagtcttcctacaaagctgcagtaataaagaccaagtaatactaacataatgatagacatatagattaatagagtaaaattagtggtccaaaaataaactctcaaatttatggtcaactaattttcaacaacattgtccagaaaatttaattcttttaattaaattgagctggggcaccatgcaaaataattattttagaccccgacctcacatcatactcaaaaattaaagtagatcatagaattaagtttaagaattaaaatgttaaaactcttagaataaaacagaagtaaatttttgtcactctgaattaagcaatggtttcttaaatatgacaccaaaatcagaaaataaaaaaaaagatgtattagacttgatcaaaatttaaaatattcatccttaaaccacatcatcaagacaacaaagcaacaatccagtcttggagaaaatatttgacaataatatatttgagaaggagactacttacaaaatacatttaaaaactcttacatttcataatgaaaatacaagtaatccaacttaaaaatgaacaaagtatttgaataggcatttcttcaaagaagatatcaaaacagacaataaggacatgacagatacttagcatcattaactgttagtgaaataaatacaaatcaaaactaccatgagataccaatgcatattcactagaatggttataattaaaacaatggcggccgagcgaggtgctcacgcctgtaatcccagcattttgggaggccgaggcgggtggatcacgaggtcaggagatcgagaccacggtgaaaccccgtctcactgtgtgcggtggtgggcgcctgtagtcccagctactcgggaggctgaggcaggagaatggcatgaacccaggaggcagagcttgcagcgagccgagatcgcgccactgcactccagcctgggcgacagagcgagactccgtctcaaaaaaaaaaaaaaaaaaaaaaaaaaaaaaaataataataatacacagaaaagcatgtatatgaacaatcatagcagcgttattttaatatcttgaaaatattatcataattcaaagaagccagtcacaaaaggccacatattatatgactccatttatagaaaatgccccaaataggcaaatctatagagacagaagttagaatagtgtttcctagggctgtgcagggggaagaagtggaaaagtgactgctaatgggtacagggttttttcctgagatgatgaggacattctaaacttagattgtagtgataattgcttaacactgtgaatataccaaaaaccattgaggtgcatgctttccatcggtaaatcttctggtatgtgaattatagctcaatgaaaccatttttaaagtgacccttctgatttatttgtacttatttaaaagtaaggtttgggtcatcaaggttgggtattttgcgaaggggaaatgtgaaacttgtgggtagataaactaggtttaaaacagcatcttaccttagcacatgccagtcttctgaaatgaaataatttatcaaagaaattgggctatcactgtccccatattcacaaagctaaatcatttatcatcttcccttgtaaactttgccgttgggaactaattttaatgctcacataaaaggagattcattctggaacttccaagtgactggattctataaagcacgtttgctgtttaacccaggaagacttgcctcagggattaggagacggaacactgcaaaactgttcccaaaactgcaccctaagtgtggttatttcacacccatggcggcgggcttagaacgaggttttatttcttctcctcctttctctgtggcaccaattgtgttggggagtaatgagacaggagtgccacacaaaggattttcctctagcctctaggagaagccggtctgcccagtcttcccaagtgaccgaaccaactgtggggctggctgggccctgggtggagggaagagagaggagctgatcgggtttcccagctttgaagtaaagaatgagccagaatgaagaagctcctgatcaaaggctgctgagcgataaggaaggcgacatgaactctccagggagaacccaggcacctgaggccaggtggggagagggcagccagctttctgaacgggcgctttgtttctgctccttttcacaacaggaaacatttgaagcaattggaaccagcaatttataagtcagattggcctaatgtgacggttctcaaactttgaggtgcatcagagttgcttggggaagtttctggaagtacaagtgactgggcatctctcccaaaggtgcaaaaattccttagatctgaggtaggaaatctcaactctgcatttttattaagttcttagggaaatgtattttctttatctggtagtaaaattagaatttcaaacacacttcaaaaaccctcacagaagagatggttcacttatagtaaatctaagctaccaattttcctaatacatgatatgacactcaaggaagtttctctgggtacccatatgcttttgttaacatctcaggaatcgggctaggtgctgagggtggagatgaataacacagccttgtttccaagagctcagcatcttgttgaggagacagacatgtaaacaaaatcaatgaagtattataagaagaatgtataaggccctgttccagcccagtaagagaatgagtaagtctgcctggagggtgggaggagagacagctgaggctttcccaaaaatgcaaggttggaagcctatgtcttcagtattaaggagcagcttgccatcccaggatgggcaggggccggtggcctggaaaggaagtgggaatattccagtccgagggaagttctgtgcagaaactgaacagacctgagaaccctgggaggtttggtatgagcatgcagaggaagttggtgatggggtggggataatgtagaaattggtctcaatatgaaagtacctgtgacctcattgaaggaagcttttggcctttgcttatatgggacaagcacttaatgcaggagtttgtcctatatctgggaaccacagaagctgcaatcctgggtataaaattgttactcgagtccagtacactcgaattgggcaaatataagggatgtgttcccagaattataaaaactcagtatttatttcccattatattttgcaaccaccaactgactactaataagaattactattttcaaggtactttaccattaaagagaaaaatttacagccattttcacctatgcttttcatggccttatagtaaccatgttaaagtaggtgttattggctgagctttctagaaaaagacatttcttagagaggcaaaacaactattcaacatcacacagcttatgaagtagcagacctaagactcaaacacacacctttttattataaatctcatgattttatactacgatatatcaatttactgagcaaaagtataactctaaacaaacagacacaattagagaccagcaactataccacaaagctctgtcacaatctcgaagagacattcaagagggaaattttacaatttctgtatttgtcaaaataggcttaactaggctgcggttacagaaaaataggcaaaacaaaaacaaaaacaaaaaaacaaaaaaacaccacaacgataaagaatgagtgtctaggacttactacagtaggagaatactttttgctcacttcacagtgtgacgcagtttggacagcactcctgggcgtctctcctgcccatggcaactcaaggcccaggctatttccaccttggggccacaccttctatggctgcaaagttgccctgactgcatctagccagcaaatgtgactgtgtaaaaacatctcgatgtggctcttggcctagccacatgccttgctttggacaatgagatattaacaactgtggagccaacaaaggcttgaaaaagccctgcatacctggccttgcttctccttgtaccctagccacctagaccaatgttctgccaaatgaaaaatattctccttaacaccagaacgtcgtgtgctgtgaggagaataaatgtggccattagtgattgacttcagttctctttattgtatgtgttcataaatgtgtggacaaaatgttttgcgatcttgacggcttttgtacaaacatcagttgtttcttatattataattatcatcctaatcgttataatgtctaggccaactgtactactgaattaatattctaagactcaggaatagctgatgcaatcaaatgaagatgggtgaaaaataaaaatggcacacatttcctaaaaaccatgtgttattaactgaactaaattaattatgccctactttaggttatttgggtagatggtggcagccactaaaaagagttcgaggtaagtgagtgttagttactctcccacaacttcactgccaggctatataataaaatcaggccttaaaccaaatttcatcacacatgtggacattaatttataaaagcagttcataaaacttgtctataaatttgatgacattccagctctctgttcttgtaggtgccccaaccactacttgcatgttagttcatttcagggagacataacattccagagatcttttcttctggaattgggctcaggtatcctctaaaactaatggctggatacagcatcacttagcaactgagccctctatttatactcaatgaattcaaattctctgtttatgtatgattgggaatgtatctaatatatctatagtcttcaattttgcccatttctggtactcaccttgcttgtcaacaagccacttgctttcaccaatatttctcacattcagtttactgactagaaaagccacgatcaagatagaggtaagagatgagcttgtggcagctgcccctgcagtctggcactctgtgattagtgccaacccagcacccctgggatctgcatttttgattaggataattgactatcactagagataaaactgaaactaactgacaagcacataatatcacactgaaaatgctgatgcactttgacacatctcatgggtatggtaatgccatgtcacttgggaattagatcttcattcgtactgtctccaaacatcattcagagctctccttggagctctttatcataccactaactattttcatggtgacatgttcgataatgtggcatagaaatacatattccatgcttgatgcaacctcaaaattcaaattttaaaaagccatttcagttttagacatacctctgtaaggtgtggatgttaggctagatttctatgcaaagaaaggtaacaagaattgggggtacattaatttccagatatcttgataacctggcagaggtcctagctgcagagttaacttcttccctggcaagaaggaaggtattttatgagactgattgggttggatcttgctgtagctcattgcctgggaggaaacagaaagctttgtgtctctcaggtatacacccttcaacagtcaaactccttttctgacccatggagatgtggtaacttgcagcagctctaaaccaggattatgactcccacgctgacattagcaattgattgaaatgcggtttcaggctagggcaggaggaaatagcacagaacaatacagccaagttcattgtgctaactgcactgcagctccctgagaagcaggtgtgagctgaatagaaaggatattattggctcaagcttcctctgggtggtgtagaaaggagagcatgtggtatatctatcaacctcacctgactcataactgatttcccccatttttttctcaaattcagtcctcttccctctcctttctctctctgtctctctctgtctctccctctctctctcgttttacctgtctgattggcagttgttcagatttccatagaaaaacattggggaaatagtgctccagaatccaaacaaatgtagctcccatctcaaaacacaaagcgggaagaattgactcataggcagtgccgaagttgggaagtagaaggagaaaggaaagaatgaaaaacttttgtgggcttgttctctgccaacccaaatgtagacgctttatatttgttaatacatgtgtctcacaaaatccctggtggttagggatcagtatcacaattcaataggtgaaaaaaaaactgaagatcaaggtatttaagtaacttacctatagtgcccaggtggtaaatgatggaaatgggattcaagaccaagttccttcattcaagcaagcggctccatcatcctcttccttttcatcacctgctcttgtgacagcaactgtgcttgatttgctttattcattcagctaatatttattaggcaaaagttatacgacagacactgcatggtagggactgaagagttgctggtgcattttctattaaacactcatttcctttcgttttgctttggagagcctcttttcctgaaaccctggttcatgtggattgagtgggcctaattcttttttttttttaagatggagtctcactctatcgcccaggctggagtgcagtggcgccatctcagctgagtgggcctaattctgtcctgtggatctggaggcagtcaacattcctggccacataaattggttcagtgatatggatgtgaaccaatccatatcattgagtattaggcaaggaactttttctttttctctgaaactattagaaaagaaaagcattttttgttaggatagctaaggtgatggaacttaaacctagactgctgctagccatctttctgaaacatggcaagggatttcttgagaatgaagtgcagatgggaaaagtgcagagccaagagatgaggagaaagcaccatttgggtgccttaatcctgactaacctgaacctgggacttgaatccctgaggcttttcagttataagagttcttttttttttttttttctagcttaagttggtttcatgccttatttcaagagaagggtgatgtctggccattatgcaagggtaatcaacacagactggatatctgatttcacaaagactatagtctagtagggagatgggcagtaataaactactcaccaaaatgactagtattacaatttataggtgccctgaggaaagggacattttctctttatctttaaaagtatatcacaaaacttttcctgggaggtgaatcagggaattctttcctataaaaattaccagatatatgatagataaaaaggatttaagtagatggaatttggataaaatgtggttcagatagagggaacggatacgcaaaagggataattgtgtatctaataaaatgaattaatttcaaggtacttggtagaaaaatagtataagagagggctgaaaagagccaagtcctatatgaccccatagactgtagaaaaaaaattaaagccctaccttaagagaaacaagaagccgtggcaagtttttcatcatgctaacataatcagacttgatttttgaaatgtaacctacagtgaggatagagcaaaggtagctacggtggatgtcagaaaaccagttagaaaactactgcagtggactaggtaacaggggatagtatcttgaattgggaagggatgtcagaagctctccacttcaggagagctaaagtggtttgggagatattttaaaggtgaatttggtgggagaggaagcagagagaaggggaagtaagggatgattcttagttatccagctgtgcaactagatagaagatgtcctcctttaatgatatagagatcaacagtagaacaaggcctaagccattggttaaaggaataaattcaagctcaatcctgttgagctagaagtgcctttgagatatgtaagtggaaatgttgaataggcacgtaaaattaagtgtctgtgtttggagcttagacaataaggttttagatagagaaaaaaaatatatgggaggaactgatgtcatggattgaggctaattgaagctgtgggtgtaaatgaagtagctcaggaaaaaaatatggactaaggattgctgtgagtctagagatgagctgtgtgatactctaatatttatctggtattaaaaataattttcatgaagacataaaatcataacttttataaacatgtaaatgaacacaagttaaagactttagtgacttattattaataatggaacaaggtagatcttacaacatgatttaatcttcatattgatctacagattcaacacaattcctattgaaatctcaactggctttttctttttttatttttattttttttagaaattgacaaactgaccctaaaattcatatggaaatgtagaggactccaaatacacaaaacaaccttccaaaacacgaaagaaatttgaaagacatacattttccaatttcaaagcttactacaaagctatagtaactaagactctatggtattgacatgaggatagacatatgaatcaatagaacagaattgacagaccagaaataaactaacatttatagtcaatcgattatcaacaaagtgagcaagcaatttgttggagaaataagagccttttcaacaaattatgctggtacaactggatatctacatgcaaaataatgaatttgggtgcctatcttacactatatgcacaaataactcaaagtgaatcacagacctaactataagagctaaaactataaaactatgagaataacacataggtgtaaattgtgaagttagatcagacagtgctttcttatatatgacaccaaagtgtcaatagaaaaaataggtaaactagacttcatcaaaattaaaaacgtttgtgtttcaaactacgcaattaataaagtgaaagatagtatctagtcttggagaacatactgaccaatcacgtatctgattaagaacttgtacctagaatatataaataactcttaaaactaaataacaaaaagccaaataattcaattacaaaatgggcaaaggattcaaatagatagttctctgaagaagatatgcaaacagacattaagcatataaaaggatgctcaatatcattagtcattagtgaaatgcaaaacaaaaccacagaaggtattacttcatacccctcaggttgtctataataaaaaagacagacaatagcaagtgttggcatggacatgggaaattggcattaccatacatttctgtgggaatgtaaaatggtgcaattgtacatactgcattttggcagttttttaaaatgtcaaatatacagttaccgtatgggctagcaattcctaaatatatacccaagaaaaataagaacatatgtcatacaaactcttgtacactcatgttcatagcagcattattcataatagcaaaaagtaaaaacaatacaaatgtctactagttgataataaataaaatgtggttttatatatacaatgaaatataatttagccattaaaaagtagtgaactatttatacatgctacaaaatggattaatctaaaaaatattatactataaaggaagccagtcagaaaaaaaacatatatagtatgtatccatttatatgaattgtctacaataggcgaatctatagaaacagaaattagactagtgtttgtcaaggccctggggtgagatttggggcaggtgtttggtgagccattgctaatggctacaaagtttttttttgtgttggaaatttaaaaatcaaacaaacaaaaacctcgtaccatctaaaatgttggaaatattctaaaaatgattttgttgatgattgcacaactctataaatatataaaaatattgaattgtacacttgaaaaatgggtgaattttatggtatataaattttgtttcagtaaagctgtaaaaaatgagtacaaatcaaaataatagactattggtcaagtatactgaatacacagaaatgaaattgcaatttgctcaaatctggctttttcacaggaaaggggttgttcatccacatataaaatttatttgcatgtgtacagacaagaattaattgcattgcctttagtgctgtacagcatacagagttataaaattgctctgcacaggattatgaaatagcttaaagcaatgaaaggtccagagcccctcatagaatcagaatcagataattcaggagaaaattttttttaggttttttttttcatttgtattgtgctaaaatacctataatgtaaaatttactatcttaaccatttttaagtgtaaagttcagtaatattaaatatagtcatattattaggcaaacatcaccaccatccatctccagaattctgttcatcttacaaaactcaaactccatacccgtcaactccccattctcttgttcttgcagcctttggcaatcaccattctactttctgtctctatgattttgacctctctaagtacctcatacaagtagaataataaaatatttgtctttttgtgactggcttatttcacttagcacaatattctcaaggttgtagtatacttcagaatttctcgcctttttatcgctgaataatagtctattttatgtggatactgcattttgcttatccattcatccattgatagacacttgggttgcttccattactcaatgcctttccacaaggttctattggctaaagcaagtctcgcgagctggctaaagcaaggccagctcatatttaaaggggatgaagaaatagactttacctgtcaatgagaggagctgcaaagtcatgttacaagttgtgtggttatattgagtggaacaattagggtcatttttgcaaataattatcataatatcctgtttttcttcttaaactgtacctagatttgcaattgcatattgattaatgtgttctggttattgttgttaatgctaatccctcccaccagatgaaagccacaaaagcgccaagactgtgctggtttttatttaagttggatgtttgttcctagcctatttttttggtgcataagacgcactaagtgaatggttaattaattaccccctggctaattccccggattgatgcaagcactggaaataatgttggcaaggtgaccgagacagatcttgcaattgactatctagtatccactgagaaaaggtatggctgatgacagctcaaatatattgttatatatgtaccaccagttgccggttaggtcagcacaactggagataattcatagacatacaaaatcactttagaacatctgaaaatcctttgggaaagaggctgagggcatgacggtcctgcttgtgttgacaacattgataagtagttaaaaagattattaaaaatatacatgcatggactacccactctaagattttgagttaacaggtctggagtggggccctggtatccacattaaaggcagttaaatgttccagttgccttttccctcatgctccgaggaatagttcagtgcagtcctttatgggtaccagcaccaatgggtcatagttctgagtatcagctctacagggccacttgtttgcatttctgaggaatcaggaatagttagaaagcaccaccatctcaagggcctgggttgcagctttgcaggactttcctgcaaaaagtaggacagatagccgtccctgtatttactctgtctgttgcattaatgtttctgttttgccttttcgtactcacccaatttcctacgttaagtacattctgttaaaatagctggtatggttttggttttcctgaccaagccttgactaatatacacattaaacttcaaatgcattcattttcttcccttggagtcacctggcatagtttcctgtacatggttctcccattgaggaaggtgctacatagaataaacccttgccagcatcacaccctcacccacactgattgtttggaaaaccccacccagatgatgttgctacacaccctggggcccaaaatatccctaccgacttgtggaacatgttgtacacatatgacaattccaacaacagacatctgttttgagatattagaggttaatctatttggcctacacagatggagccacatgaatgaaggagagaaaagcaatttagtctcacttgttagcagtgacttggctggggagtgaagggccatctaggtcccaccctgttgatttccggaacaaaagtaattacattggccaaagccaggaaaatctcaccctctatttatagcgtgtttgattccccagagacagatggaagaacctgagtctaagcatgtacctgattctatgatcttcttttaagatactacagtactctaatgggcaaaagtagtacacggttactccctgtaccaacagatatttctttgggagctaaagtttagtgaagatattgggtcaaaaaacagaacagaagtggacaactgagatttgttttccaatttttacatcctttttttttttcacataaacatgaactttgttttagcatcctgatgcctcagttcacctacttacaaaacatctctcaaccacatacattaacgtatagaactgttgaaaatctaagcaggcccaatatgaaacataattatttaagaaaaatgagtttactaaagtctccatttgccccaaatctatcaaatccatttgtattataggatctagctcaaatcctatttcctccaggaaaccttgccaaatccacagctagaagtaatatgttctcctcttcaatccccatgcatgttgctttggccatgaaatgggcagaagtgataagtgtaatttcctagcaaaggcttgggaaccagcatatgccttttcataatttcttttttcttttttcttctgcaatggaactagtaatagatgtatctcaatcagtctgcacctgtgaataaaaacatctaaaccaaacgcacagccctggatgaggtagcatgggctacaaatagaaaaccttcactgatgtaagacattgaaatttggggctagtctgactgatacaagccatgtggtatgttatatgtgatagtactgaattaaaaaaaaagcttccaccatttacatgactggagacattgacaccaagatatttaactttcctggacctcagctattccatctgccaaatgggaataaaatcttcttgcccgaaggtagaatgctggctctcttgaaatttatttcttctctgatatatgaagctgaattccttactgtttcaaggttcctcctaaggaaaaaaaaattacttctattagcaaagatgtccattcttcagcaaagcaaatgtctaagaagtcatagttgtgaagacttgtctgcagaaacagggaaactttccaaaacatcaactgccacatccatccatcagaaaacaaacaaacaaaacaacagaattaatgagacacacagaactgagctatagtcctatcgaaaaactaaattatgcaacagctgcagtaaccccagatattgtttttgtcttctcatttttttagatatgtacaattggcgggaaggtattcatgtttggcatttctttttctcatactttggccaaagatgacaattacctggaaagaagggtagctatgctcaccagtaggcatttgtgcatgcttctagctgaccaatgccagaataaatttttataggcacactgagagtattacattccagggggtgttttcatagagctcttctcaaaaagttggcctctagttcctcccagtacctcataagttgccacacaaggtagatcagcctgactgccaatttgagcaactggcaatgctttggtggaaaacaccaagctagtctcttcccagagtaacatttgatggggattgggtcaaatgggctatactttagctatattaaatttattttaggtaagccttctctcattatagagtctcaaaggggtttgttttttaatgcaattttcttgcaaaattagggcatttgccaaaattatcatggtggaaatttggggtttcagttttgaattgacaaaatggctttatattcaggaggaatcccactactatgaatgtcaaaggtacctggatatttttttcatcacctcatgtctgctggagactatgcttaacactgaaatatgatcaatcagagactgactcctacttgggactgtgaattctaaggatgtgatgaaatggcacagggtcagtaagtcattgtgatagccattgtagagttgatagttcagtgatattgaactgtgttctgggaatggttacttagcagcacagggacaaatatatagtgcagcagtgcaggagaactgcccagagataatggtacaaacaccatgatggtacaagtggcccttcctggaccacttgtcatgaccaggtcttggctaagcccttgctcctcttgatacctcttcaagtctcctttccagggttactgaatgtttttgagaatacattgttacccttactttctacttaagttaaaataagatctttttttttttttgccaccaagtgctttgactaatgtttcatttctaatattctcaagtttcattttgagaattttaattttagaatttctcatgcattgttctccacgctttgctcttttcttaaaagtctcttactcatctcttgaagttttatcaaaacctcatttaacactgggacagtaggatcgtgtttacattttatttggtatgctaaatatgtaaatttaattctgttcaatgaatctatttaaaaagtctatgtataccttttgaaatctctcatggtacttgagttttaaaatattaatagtattttaagaaaatcattctaaaatatttggacgcccatttatatgcaaaaaaaaaaatttttaatggatccttccctaaatttataacctaaaacaataaaaattctagaagaaaacatagaaaaatagaaaattatgtgactttgggataagcaaagatttcttatatgttacacaaatgtacaatccagaaaataataaattagacttaatccaaattaaaaacctttactcttcaaaagacatttttaaagaaatgaaaaaccaggccacagaccaggagaacatatctgcatagtacatatctgataaagtacttatagtcagaatacagaactgtcaaaattaaacaataaaaagtaaataaaacaaagaaatacacaatccaattctttttaaaaggggcaaaaaaatctgaatacacactcaatgaacaagatatacggatgacccagttacaaaaagtgctcagtatcattagccattaggaatacaaattaaagccacaaagaactaacaatacacatctgttagaatagctaaagttgtcatcaacattatcatcatcaccatcaccattattattataaaactgacaatgccaaatgttggcagggatccagaaacaccaagattcacatacatacattcccatgcatatgaacactgctggtgggaatacgaaatggtacagcccctctggaaagtagtttgacagtttcctacaaagttaaccatatactttttatataatcaatctgtcttttaggtacttacccaagagaaataaaaatctatgttcacaaaaatacctatttacacatgtttatagtgactttactaataatcttcaaaaactggaaacagcacaaaagtctttcaactggtgaacgtttaaccaaactgtgttataatgtttaactaaattgtgttgtatccctacaatggaatgctactcgatgataaaaaaggaattattaacatatgcaacaacacagagaatcacagatgcagtatgctaagtgagcaaagccaggaccaaagggctacttactgcataagtccatttatataacattctggaaaaaggaaaactatagaaacagaaactatcagtggttaccaggagctgggtatgtgtatggggtgttttgttttgacctcagatacttaccatttatttgtggtaaggacacaaaaaatctactattttatcaggtttcaactacacaatacattgttattaactaaaatcatcatgttgtgtggggtgtttggctacaaagaggcacaagggaatatctagagatgatgaactgctctacatcatagaactatcccattaaacagactaaattttactctatgtaaattatatctcaaatcatgacttttaaaatgttaacagaaaattatttgttctcaaattaagtactagagaatgtattcatttaacaaacatttattgagtgcctactatgtgccagatctggctctaagtgcttaaaaacagtgaacaaaatacacaaaagaaactctgtccttgtggagcttgcattccatcaggagaagcagtgaataataagtgtgataaataagtgaagaacagaaaacaatgcttccacagacattactgtatatgagaaactagaaggtgtgtgaaaatacagaaccctgtgccccactctggtgatgctgattcagcaggtctagggtggagccccaaagtttgcatttctaacaagctctcaggtgatgctgatgctactggtgagggaactacacattgggtagttctgacatatgatgtcagaatgtggtgccataaatgtaagaaaaacaatgactaaaggaatattaggaaggaaatctgggaagatgtagatctcaactttaaatagtgggcttcatggagcagttggcttttgggcagaaacatggagaagaggaggaagttggctgtgtagatatctggagaagacactgctagctaaataaacagccaatgcctgtgaattatgtcaggggacatgtttacttttttttcaaggacagaaagaggccagtgtgacaggaatagaaagggtgagaaggagatgaataagagatgtgttcagaggaataattgtaggaggagagtaggcagaagaagttaaggcctttcatttttgctccaactaaaacatgaatccactgaaaggttttgaacagacagtgacatcatttgactgatagcctacaagaaccacttaggccattttgatgagagtagataaaaatggaagcaattcactcacctaaaaggttgtcttagaaacctagatgagagaatacttttgcataaacctcgtggccaattgtgcatcttctttgaagaaatatctgttcaagtccttcgttcattttggttatttgtgtctttttcaaattagtgttagtagttccttatgtattttggatattaagctcttctcacatatatggtttgcagttcttttcgcagttcttttccatagctgctttttcactctgttgattgtttcctttgttgtgcagaagctttttagtttactgttgtcccacttgtctatttttgcttttgttgcctgtgcttttgatgccatatcaaagaaatcattgccaagaccaatactaagaagattttcccctacattttttttctaggagttttaaaattacaggtcttacatttgagtctttaatccatttttagctgattttctgtaaagtatatgggtctaagttttattcttttgcttgtgaatatccagttttctcagcacaattttctaaagagactatcttttcctcattgtgtatgtttggcactcttgttgaagatcagttgaccatattaatgtgggtttatttctgggctttctattcatttaattggtctgtatgtctgtctttatgtcagtactgtactgttttaattactgtagctttgtaatatattttgaaattagaaagtgtgaggcctccagctttatttttcttgcccaagattagtttggctgttcagagtcttttttttattctcactgtttgggatgggttgttttctttttttttcttttttttttcataagtttttggggggaacaggtggtgtttggttacatgagtaaagtaagttctttagtgcagatttgtgagattttggtggacccgtcaccaaaatcttacagtgtatagtatacactgtatgcagtttgtagtcttttatccctcaccctcctcccaccctttccccaagtccccaaggtccattgtatcattcttatgcctttgcatactcacagtttagctctcatttatgactgagaacatatgatgtttgattttccatttcttagtcacttcacttagaataatggtcttgaattccatctatttgctgcaaatgccattattttgctccttgttatggctgaacagtattccatggtgtgtgtatatatatatgtgtgtgtatatatatatctctctctctcacaatttctttatccactcattgattgatgggcatctgggtgggttccacatttttgcaattgtgaattgtgctgcaataaacatcattaatcaccagggaaatgcaaatcgaaactaaaatgagatagcacctcacatatgctagtgtggttattatttaaaaaaagataatgagtgttggcaaggatgtagagaaatcagaactcttgtatactgttgataggaatgtaaatcagtacagcattgtagaattcagtagggaggttcttcaaaaagttaaaaatagaactatcatatgatctatcaattccacttctgggtatttatccaaagtaattgaaatcaggatcttgaagagatatctgcactcccatgttcattgcagcattattcataaaatccaagatataaatgtctataaatagatgaatggaaagaaatacacacacacacacacacacacacacacacacacacacacacacgaatgttattcagccttaaaaaaaaaaagggaaatactgccatatgcaacagcatgaatggacctggaagatattatgctaagtaaaataagcctgtcaaagaaggacaaatactgcaggatcccactcagatgagctacctaaaatagtcaaactcatagaaacagaatagaatagtggttgcctggggctggggggaagggagaaatagggagttgttcaatggttataaagcttcagtaatgcacgatgaataagtgttagagatctactgaaccacatattgcctatagttaataatactgtatggtacactcaaaaatttaagagagtagatctcaagtgccctcctctcccacccagcccctggcacacacacatggaagcagggggaagctactggaggtgatgaatatgcttattacttttattgtagtgatgctttcatgagtggatgcatatgttcaaactcatcaaattgtatacattaaatgtgtgcagcatagtatatattaattacacctcaataaaactatttctttaaaaaagaaccctagatgagagaatattgagacttggaccagagtggtacaagtggcagtggttagattttaagtctacttttaagataaaatccatagggttccttgattgattaaataccagttataaaaaagagagggtcaagtgtgacttgaaggtcatggacatgagcaacatccctagatatgatggacatgagcaacatccctagatatgaagactggtagatttgacttacaatctaccagtctcaggtttccaaacattaagcttgctaaaagactttggctggcaaatatcttcctttcttaactctgcaatagtggacaaaagttacatttttcccaataataagtgagaaaaatatcagaataagaagctgtgtaaagtaagatatatcttacatgatggacttggccataataatcaaggtattctttattgtttttatcactctccttatcatcttgatcatcatcatcattgtattttagattttaaaggaatctggatattaagaatccgatgcactgattttcaggtgagaacagccaatctgatgctcatttcagcttgcaatactatttttagtaaactccatttcgtagaaagatttttctctttttaagaagattaactggtattttatcatttaaaagctgaaaattacttctaaacatctttgctgacaattttaaggaaataatactatgtgactagtgaagacctaactttttggacattacacttttatgtctcattatctctatttattcaatgagaggcaaagacaatttttttattaaaatatatataaggcactactagaaacacaagatgattaagataatttccactcacaaggagtttataatctaaatttaagaaagatatacaacatattttttaatatttcaatttcataatgttttcacatttggaagcctattgcatcatatattttaatgcaacatcaataagatttagagaagatatttttaagaataatgagcttgctgtaagaggaatatatacttagaattaacaaatgtgcctttgaagtacttagaagcatgtgttgcacttacctgacaatcattaaccattatcattgtttaaaattatttccattgctactattattactactactgtccttactagtaatatttttccaggttccatgtattgaataaaaagtaagtgttgacctggaaagtggatatgaaagagggaaatctggatttgaacataggccaaaaggtaggaaatagtaggctatgtgaactcacagaaatatgttcattgaggtaaaaggatggggtcaaatactgcctctgatacttatgaggtattcaacattgtataagtttcttaatctctgttgtgtctcaaacagaaagaattttttcaatttgaaataaatgaatgctagataataattcaaagccacaagaaaatataaagttttccagtaacagtgaatacataaacaaatataaaagctagtattattgttgtgatttatacttggccttttaattcttttataggatttaaaaggcaaagcataaaaataattgtataagttaaagaatacccagtatataaaaatatcagttgtgatctcagtaatataaagtgtaaaggcaaagctatacaggattggagatttgtttggaattggagctacatttctatcagttaaaaatagattgttataactttaggatgcatgtaatcactttagtaaccataaagaaaatatctgtagaatatacaaatggaaatgagaagggaatcaaaatatgtcactataaaaaaaaaactaaacgtaaaagagggcaataagacaaggaagaaaggatgtacaaaaaatctataagacaaatttccagaaaaacaacctaccagactgagccatgacaaagtagaaaatctttgcagacctgcaactagtaaggagattgagtcagtaatcaaaactttgcaacaaagaaaagccaagtaccagatggcttcacatgtaaattctaacaatcatttaaaaaagaatgaacaccaatacttctaaacctcttctaaaaatgtgaagtggcgggaatatttcttaattaattctatgaagtcagtattatcacatcaaagccagacaaagacactacaagagaagaccactagaagccaataattctgaagaatagtgatagaaaaattttcaataaaataaaatcaaacagaattctacaacctattaaaaggattatacattctgacaaagtagaatttatctctggaattcaaggatggctcaacatgtgaaaatcagtgaatgtaacacacaacattaacagaaggaagagaaagcaaacatgcacacacacacacgaccatctcagttgatacagaaaatgcattttacaaaattcaatacattttcatgattaaaaaataatttgcaatgaactatgtatttttaaaaagctatctgcatgaaaagcccacagatggaagactgaaagctttttctttaagatcaggaatgagagaaggatacctactttcacctcttctattcaacatagtactgagagtcatagagctattacacaagaaaaagaaataagtggaatccaaataggaaagaaagaagtagaatgatctttagataacatagtatttaatgtagaaaactgaaaatttcacacacaacaatgttagaactaataaaataattcagcaaggttgcagggtacctaatcaacgcacaaaagttatttgtgtttttatacattaacaataaacaatctgaaaaatattaagaaaacaattttatttataatagaacaaaaattggtttttagaataaacttatctaaggaagaaaaaatgtatatacagaaaactataaaatgttgattgaaagaagttgaagacaccaatatatggacagacatcacatagacatggcttggaagacttaatcttggtaagatggcaatactacccaaagtgatccacaaattcaatgcaatcactaccaaaattccaatgacacattttgcagaatagaaaaattcatcctaaaatatgtatgggatttcaagagaccccaaatagccaaataatcttttaaaaaaagaacagcaaagttggaagtctaatccatcttgatttcaaagcttagtataaaattacagtaatcaaaaaagtgtggtattgacattaagacaggcatatcaaacaataaaatggaataaagagttaagagataaaccctccctcaaactgtgaatctctgagaagaaaacacagggaaaactttatattggtttcagcaatgatttcttggatatgacatcaaacgcacagggaacaaaatcaaaatagtttaagatatgattcagccttaaaaagaaaggaaattctgacatgtgctacagcatggatgaactttgtagacattatcttcggttaaataagacagttgcaaaaagacaaatgctgtatgattctacttatagggtacctaggatagtcgaatttatggagacagaaagaagaatggtggttgccaggagcttaggggaagagtgagtgaggagttactgtttaatgggtacagtgcttcagttttgtgaagtgaaaacagttctggatatggatggtggtgatggttgcataataatgtgaatctacttagtcccactgaaccctatgcctaaaagtggtttcaaaaataatgatcaactgtcaaataggaaagcttaggtcagaaaataaaacccatccattgggcttggagatttggattacattcataattttgcaagttaagtggctcagtggaggcacgcaactacagaatgaatagaaggtggaaaagtagtggattgaagggcagataccactggtgaggagcttggtgaaggcacgaaaaagagggtttctagaacggtaaaatttgtccagaaccccaggtgtgttgccagtcacctctagaatacacttccattctccagttgcggtgttagccaacttagcgaagtcacagatttcaaagtgtagcccaggacatacgtctttttgataaaagacatataaaataagtctccctatatcaacaaagctattgctaattaaaaataatcatactttattaatgtctatatcagtttaaaaatattatttttcgttctcagaacaatcttgccatgcaggcattatccttatttgacaaataggaaagtccagttgaagaactccaaggtcacaagggtccaaatgacagactctgtaactcgaagccagtgtgctcctgaatccaagtgtagctgtggactgatggtccttagcctccttcctcagaatggtgatccatcactctgtttacttacaggcaagggcatgaggtaatgccatttattctggcgagaccattgatgctgtgtctaaaggaacctggcacaaataggttctccgtaggtagacatattggggaaatagaaatacccttgaaggactaaggcaacttggaaaatagaaagtaagatggatgggtatggatatggaaatccactgaatcagatacagacacattccttcatggtttaaaaaaaataaaaaataaaagaaactatgaaagtaccaaagacatgaccctaattctccaaggagcacagttgtagggctgctttgggtctctctagtttccgtgagaaaatcttggctggcagggccccctgatgaaagagaaatgactccttgtgtgagatttaaagcatttctaatttgaaagcaaacataattgcacatactttacatacacatgccatgtggaaataataaatgcatttgtgatgaaaatgcttgcttcatttattatactaggagtttttccaagaaatggaaacaattgttagaagtgacattaaatatttaactgagtttcttttttcttctttttcttcgtattttttattaacatattttaaaatgttactaccacccaataaggcatatggctcctgatttgtcggagtctttcattagtttaaaatggagaaatcagtctccaaaaaacacatgcaacgttagaatatgacacaggtgaaacctgaaatgtaaaactatgctctccaaggattttgaggtctgtggaaaatagccttcaattcttacactgtgaaatgggacttcctaagttaggacttggaatagcatttggtggcatagtaaccatgacctaactaactggatggctgttttctgaagtggatagttgaatggccttaaattttcagggtgagataggcgaaagtccagccattgatgcacgagttgtgaggcagggagatttgcaaatgtaagtatattcgtgaggaacctacctgctataaactgaatgtttgtgttccctcaaaatcatatgttgaaaccagaattcccagtgtgatggaatttgaagatagagcccttgggagactttatgataaaattagtgcctttaaaataataggcaggagatctctctctctctttctctttctctttctctctgtctcttgctcactctgccatgtgaagatacaaggagaagatggttttctgtgaaccagtagggcccttaccaagaacatgaccataatggcacccagatcttagatttctaggctccagaactgtcataaaaataaatgcttgttgtttaagccatccagtctctggtattctgctctagaggcctgaactgactaagacactatgcgtccattaaattgtgagttctatttcaaaagaccacaaaagctcattgtgatacgattgttgtatcagccaatactgcatcataaaccatcgcaaggtcctgtgactaaaaacaataagcatttatcattgctcataattcagtggattgccaatctcagatgacctcacctgggcttcctcctgcatgtgtagtcagctatgggctaggaaaacaattctgctgatattggttgggctcactcactgtttggtgtctggctgggtgctggctggtcatggatagtctctgctttgtccccacatggtctcatcattcatttgattaggccacgcttgttcacatggggactgacacctctgaaagaataagcagctcttccatcctcggctctatttctccttcctccaacacacataaacacacacacacatacccccagaccgaaaatttcagaaggtcaaatagcaaatttttacccaacataggataagtaaagtggatacttcagggctaaaatcatacattttaacacatctttctcaggtagaaaaactagtcaaagatttaaaaaaattgaacaatatgattaatatttaatcatattattagtgagaggatttgaataatacgtttcaaaaatttgacccaatagccatatgtggaacacaacacccaacaattgcaaaatatacatttgtttcaatctcatggaaaatttataaaaattgaccttatacaggactataaagtttcaataatttcagaaagttagagttagttttatagttatgtatagagttaaggtaactgttaggtttagactggaagtaaggaattgggtctaccattatctttaggttgagcttagctttagatgtagggtttgtatttagaatagatctaattcggattagggtagatttaagactagagttatcattttgcttgttttaagactagtgttagttttagttttaagattagtactagaacgattattaggttaatggtgagaattcatgttgggattaggattaaagttagggttgggactaggtttcataattcggtcagggttggctagcattttatagaattagtagagttaaggatattattagcattaagatttggatagacaaactaatgaggcaaaacagaaaatctgaaaacacactttctttatacaggtggcactctaggttagtaagaaagtggctatcatttagtggaggccactggacaagtgggtatctacatgggaaaaaatgatttggaattcctacttctcactatccttaaaaattaatttaagttggagcatagtgataaattgaagaaaaaatcatacacattttagaagacaatataagtaacatttttcctaataatataggaggaaaatggtttttaacgtaagataaatgaaaaaaaacctgataaatatactatatcaaaatgatccattttgattattcaaaagtcactattaagagagtggaaaggcaaatcacatctggaagatgtttcaatacaaagagccaaaacgacttgccttaatgtataaagaacacccgcagattaataaagaaaagaaaactagcccaaaaaaccaaaagacttaaatagacccttaataacagtacacagatttggcaagagatttgagctataagaactttacaattctgctggtaggtgaataaactgatacagttgatttgaaaaatagattgtcagcatgtagtctagttgaagttatagctatgtccaagtaatggcatagcaatagatagcaatacagatacaaaattgtgtgctcaagtgcaacaggacagaagttcatgaatattcacagtggcattgttttgtttttaatagttcaaaacttgcatatttcccaaattgaatcaacaatggaatggacaaataaatagtaactaaaaacagccagacacaatagaatacatacagattggatttcatttatatagggctcaaaaacaagaaaaaataaagctaccttgtttaggattgcatccatagtcagaaagcaaggaactaatgataacaagttcagaagtagctctgatcagaaagttggggaacttctggaatgatggcccatttctctttttttttgtttgtttgtttttttctgagacagggtctcactctgtcgctcaggctggagcgcagtggcgcgatcacagctcactgtaagctccacctcccgggttcacgccattctcctgcctcagcctcccaagtagctgggactacaggcgcctgccaccatacctggctaatttttttgtatttttagtaaagacagggttatgttggtccacttcttgatctgcatagtgaatacatgagtattgtctttacaataaatcattaagttgtaccttcagtttttgtggacttttctgtaagcatgccacatattataacaaaaagattaaaaccatattattttaatggctgcattttacttaatgatttacctcattgataaatatttacattgcctcctcttgttttccctgctcaaaatagtgtttcagtaggcaaatcttcatatgtatttttaaacttctttcttagaatagattcctgaaagagaaaagactgggcctaaccatatggagttttaaagtgttcttgatatagcattaaaatattttccaagaatactgcaccagctgcactccctataatgtaaagatttctgaatcattgcacattcaccagtatcaaatactatagttttttttaacctatgcttatttaactggagtggggagatggtgttgagaaaccaatatcgtgctattttaatttacatttacttgatttctgcctagtaaaattgttaaagtatgctacaacattcagattgaaggatcaagagtcaaatttttggtgttcgaattctggcactaccgcccacacactacttggctttgtgatgttacctaatctttgagggtcaaattccgtacatgtaatatagaaaagggtgctgtgataattaaataaattttctcatataataagcatagcacactacttggcatattttaagtcccctgtaaatgtgtgtgtgtgtgtgtgtgtgtgtgtatgtgtgtgtgaatagtgttgcatggagcactggagatatgggacattaagggtggaaagatgaaggagggagggagagaaggatagaggatgaaaagaaggaaaagagataagaagggagggaaagaggggaggagaagagcaaaggaaagaggttgggaaggagaggaaagaaaggaggaaggtttggagtggggaaagcaggagctgatggaggaagttctaaagggagtaatgaatcaagtgttggatgataagttaaagggactggtgatcagaagcattcagttctttattcctcccagaacaagagtttatttttcaaaatttaaaaacacaatatagagataaaccataccggaagcaagtgtcagtgatcaaggctctggagacccacagttctggttctatcagtctttagctacatactctggaaccacaactctccgaaccacagcaaacacctaatgttcgctgcctgcctaagaattaaataagaagtatatataaagcctggttcacagtatatttcagaaaatgaaaaaagatcttgtttgacaatcactacaaaagtattagcaatggcttaacgtgtcattaccttaaaattggtaaattttaaataccagaatgtgatgaaagaattaatcacttaggaaaggttcatggactattagcatgtgagtgtgcgtatgtgagtgtgtgtttgcccattcagggtagaatctggaacgaaaatgtggatagcacaaataaagaagagatattgagaaagtgttctttgacccatttccttgagctatcaggaaaatcacggaaatccccggtgttgtttggcagttgagtggaacaaggaaggcacggtggcagcccttggctgagaataagagaatctttacctccgtcatcacacccagaaagacttggacttactgaagccaagagaggcaagttaacaatgttagaccaaagaggccgggaacatggggtctgaaacatcatgagctacacgggacacattttatcaggtaatcacatgtaagtatcatgcacaatatgaccatttcattctgtaacgtcaattccaattcatagcatgggtatgccttgctatttttcagtggtattccaaatatgctcaagaatagccgactttaaaaaaatatgaatagaggaccaaaaatacaaagacaaaaaaaccagtgtgtgagtatctgcagggattttacttcatggtgttaatgatgtgagatgaactattggatgactcagtcaagcttgtcagcctaactgccattcctacaggttctattattgtgttctcaaatctcaacaagcctagtagaaaagaaaagactctaggaatcaggttacataaagggaaaaaaaaaacagtgtgctctctgggagctgcaacctagttaatgtataaataatggcaaatttatattataaaatatgtattaaacatagaggatgactgtcaggtaaggctgtggccctagtagatgaatctctttctcatactcatgaaacccttcaaaacaattgatggatatgggatctgctgaaaatccttccactttttggactaagaatatcagactcaaatactcaaatattttcccgcatgagagaaatacttctctaagctgtaacacgacagccccttctaaacctagaaagctgattactaagctatctgtgtttgaaccagctcccacaaatgttgcttatgaaataactttatctagttgaactgataacaatagcttttgaaattataatataacaataagaaaaacaaatcaaaagtaattcattagtccctaaaaagggcatttccttgtaatggtagtatgtcatttggttctagattgcaatggtaacattcccttgaggtagaagagcttttatctaataatctacaatttctatatgagtcttttttatctggagcagtagtgaatggtcttaaaggagcccagactttattttgtgtatatcttctggcacatatcacagttaatggagctctttaagattttctctaatgatgttaatcaacacattttatagtcctaatctgtaatttaaatgggaatctaagaataagatagcatttggctcagaagtaaaatgtgggaacaccctgggcacactgatttattttggtaaacagagctggcaaagttgattttaaggcaagaaggcatatttgatgagaacaagatgataggagattcttcaaaacaattgatggatttgggatctgctgaaaatccttccactttgtctaatgtctgatgatcaaatatctttgtactgtgaccagagggacataatgagttaaaacacacacacacacacacacacacacacacacacacaaaaaaaaaaaaaaacgaaccaaccagacagaagtttacacctgggaaattaaattatctgaatggggatcctacaagaaatattctctaactcctggattctgtcataagtgtcctctacaaagtactgagatcatttgtgtcttggccttcccatgaacaggattgtgttctaagttgtattgctatttttcacagaaaaataagtggacagtaagggaacaaatggctaattgactggttccatctcattggagaaggaggaacactgtctaaattgaaagcaaatttaatttttccctaagtcatgtttcttgatgtctctgcaacatataatgcacttgaccattcttgttttaaagcaaaaacagctttgttacgtttttgttacttagcaaatttgtagtgattttagaaaattcacacaatatgggaaaaaaataaaaaagaaagtgagaaccatcaaaattcctctaatcatcatccctttgacccctaaatagctaggtcaccattttcaacattgtaaagatcatcttcctagatatttttctattccttaaagaaagaacatctatatgatttacatagatggtattatttaaaaagtgagatgatgtgtctcttgctctcacttatcagcatgccaagtgcccgatctggttcaataatacagacatgcctcatcttttttattagggcgatgtaatactcctttgaatgtatgagtcacattttattttaccagtcttctagctgacagacacttagcttgtgtccaatttcttattatagtaaactacactgccatgaaagtcccaactctgtaacagacacctggagtgccttccacctcactggtagtgtccagattcttggacttttttggccactttatcctacaccatttaaaaatgcttcttgcacctcctctctgagaaaatacaagctctggagccagactgcctagatttaatcttatgatgtctctgttactatgggcattattcttttacctctcttgtgccacagcctcccggctataaaataaaaacagacaacaatatgcatatcctagttataatatggataataataataatatcaaatgaaattatccgtgtataatgtttggcatgtatgtgttcaatgtatttcaactatggccattattgtgatgttctcattcatctctctcagaaaaccatttcccgtgtattcctgatctttcctactcaagatttctaaattatgtcttttgcccacaagtgttcattgcatgttctcaaatttctggaagacatttatgctggatgttctaacaccacataaattttatacagatcaaaatggctaccaaatgaccttaatacaatcctcagtgtcatatgttatggtttctcttgtctactatatgcccagtcagtcacaaattcatgctgagttttctcatttcctcaatgtgttccaaacctatctctttccatcaccctatttccagcttaggtcagacactgctgggctcatactcagatgatggaattattaacacctttacggagacaatgctttccataaatgacatatcaggaggaaatccaatatatttgacaagtgaaatcatcactgctgctgttattgagacaggatttagggcttggaactccacctctcttccttcatcttccccaaatgcccccttaagtaactgaaccccaattattcctccggaaagaggaatttcccttcaagcttccacttgctttttctccaagctctcctgcacatgggagacaacataatcaaactaatgatacaactgtggtcacatttctcccatgacccaatctatgcatagttgcattcaaattccatcactgacattcagttccttctcaaaaactccaaatttagccccaagaagtatttttgactttataaataaatctattccaaagtggcccaataagaatctacatcatcatcttgttgttacacatcttggtgtggggttcatgccctcaaaggctggcttccttccacccacatgctctgacatctccacaagccctcaagggcttatttaaattctgtctctgtggtttcacaaacattatgggactcccctcttagatttgagctcccttttctctgatctgcagaagtatcacatatttctgaatatcattttgtactgagaatgtgtcatgttttctaaaacttaaattaatttttcaatgccttagagtgcctcatacatgcttaaagttcagtcatagacgctggtatccctggatacagtgtgctccaacaaggcaaattttaagatgctgtgaaggattggaaggctgtgagtatcacccttcagtcatttacttttcatttgtaaccaatgatgtttcttttggggtatatttgtattcactctcacatcttttacgattacaactgtggttattcttctgtaaaaataaaactttggtttttctttattgaaaaaggtaatatatgtatatattaaaaacacaaatcatctcccaaagttatacagtagaaataagcatccttctccctccaaatccctcatctcctagttctacttcaaggccagcattgttacaaatgtcttagtgattatcttgtaatcataatttggccctggacttaacgctgccatttcaccacaaaattacgttttatttctctctgtgtctgaaacagtcaagcagactttgcaatctccttcctatcctcaaggattactggcatcctagaaaacctcccaaggccccacccctctatgctctggctcaaagcatcccttcagttttaaacatttgataatgagctcactgaccttttatttagactaactcttcctctattcccacttggataactcaaatcagacccctacagcatccagtctccaaattcctggaagagaactaccaagagtagagtactaatgtggaacttgggcaaccaaaaagagtaaagcccattaaattagcttatccatgaaaaaaaaaaaaagttgcttatactgaatttgaaaataaagaaatatgaataaatcttgtttgatgtgtttggatataatttagaaggtaagagaaagagcagagggaatggggcaaatgaaaaacagggtttgggcagggttacattaaagtgatttcattgatgagatttaaaaacttaaagtaataattaattacttttatttattttattttagcattttataaataaatacaatttttatttataaataaataaaaataaatatttatttaaagtattgagttaaaatttaaggtaaattttattgatgagaaattctgactgaggcaggatctctggactagattcagaacaaacataataaaattctccacagcttgtgtggatgcacacacctacctcttcccacacatgccaaccaaagagattccatgaccaatttctgaaaaaacttacatctcaggccacacatgttctctgctgggtatattaatggaaaggctgaattcacaaacatctattttccagaactactattatacaagctgggctctaatcacagtctgggccaaattactctgctctggttttagaagaattcagttggcgagaaacagttgacttgaaaacagtcattagctgagttcctgacaactttattgaatcagaaaatttatttttttcaatacatttgaacatgtcatggatgcttttatgtaacacaaagaggtagaattagacaatccctaagatttctgcaaattctaaaatattgttattaatattacatcaagtgactgggcaatattcatactccttaatgggtattcaccctactgagtttacaattcaaattatggaagtttaagaaggattcaattctgagatttggaagcagctataagattgttgaaagtgtatttgctaaagcaacatagtttagtttagtatccctgcctcctaccagctaggattcaggacaagttccttaaaccctctgagtttttgtttcttgtcctacaaacctgagataataatgacttgcttcacagggatgtgtggagataaaatgagataacatgtgttaaacagctggcaggtaatcaagaaaacttaactcccttcccccactctcaatgaagagcaatttcaagatgggaatcactagcatttttcctgggatgtgattttaccagccctagggatagaaggttaggtcaagagcctttagagagtaaaaaacacccacgcagtgagaatatgcattccaggcatttaggcagcttcacctctcacagggccttgagaacagggcttaggaagaaatctctgagacttttggtctcctgttgtatggtgcaaagaaatgagattgtagagttagattacgtattagcacagtgcgtttgagacaaaagctgaagtggatgaaaagaaccacatagaaatagctgtatattacactggctcatatgttcctgtcaagtagaaagtagatgccagaaagtccttttagcaattgaagagccaacaatatatgcaaaaaaaaaaaaatggcccaggacaaaaagaaaggttttatatacttttgcatttcggtaaaacacaggtaagcatgtgctgagagtttgtggtggtttggaatcatttttattctgtggatgacttcagaatgacaactttgatagattcattcttgccaacagagtatatataaattcactctatgaatgaaaggagagaatgggagtgttttcatgatccatcttaagactttaattggccaggaacccatcaatgtgctaaggcatgcatgctatcttagaattaatagaacaagaatgctacagcctaagagatcttcctgaaagaataggagaaacctctgattgcccccaagttctctgttcaagtgtattttagaactcatactgaacttatatttactcctattctgatgaaatgtactaagacggtatgtaattgtatacatgatataacccaactaaaagcaggggtgttgggaaagaatatgcagtactgatccttattgaacacctactaaactacaggcaatttgaatgtattgtttagatttttcaaagatttccaatgaaagggttataatactaatttttcaaaagaggacaattacatctcatctgatgctggtcaaaggtaaaccaaaaatagcctttgctgtgagaagaatcatctgacctcctgtctcctaaactcctaatgttgttcattgaaaagtagcttgcatgaaagtgaccttcttttttcaaaaggctttttttcctcatcccagtgaaccctggtagtattctgagtgtagaaaataaaacaacaacaaaatgagctgagacattcaatttctcttccaaatcaattcctgcttgctagggcttgaatggaaacatgcttttttttttttttgcatcattgaatgaagctatttgttaagatgtgtttattagacttacataagagttcttgcccaaagaactcacactcagtttaagggggaacaatctttatgatctctggctctttcattttaacattacagtgaaaggctcatcaacatgtctactttttaatttccacagatgaagaagcaacagaatagaaggaggtgtttaaaaatcatatactctattttttttttttcaaatcacaggtctatgtcaaggtatacttttcacaaacttaaggatacttatctgatacaaatagtgagggccaggcatagtagctcacagctgtaatcccagcacttcagtagactgatgcaggaggatcactggagcccaggagtccaagatgaacatgggcaacatagtgagaaccccagctctgcaaaaaaaattctcttaaaaaattagccaggtgtggtggcatgcttctgtgatcacagctatttggaaggcttaagcgggaggatggcttgagcctgggaggtccaggttgcagtgagccacgatggtgccactgcactccagcctgggtgacagaacaagaacctgtctcaaataaataaataaacaaataaataaatgcatacatacatacatagaaaatagtgtgcatgagtcaaaaatttatttaatttactaataaaggaatcagcaaggtggtaaagtggttgaaagagaatttaagagactaaacatatatataggcactaaaatggttctgggataaaaatgctagctttgattcaaccctggttaatgttccacaggcaaaaagactgaaacttttggagttattttttttttaaccatacaaatcctatacaggtgtctttgagactggtccatagtcagtagcaaatactaactcaggcagaggacatcaaagcttttccataaagaaccagatagtaaatatctaagacttggtgggctatatggtctctgttgcaaccactcaagtgtaccattgcagcacaaaagtggccatagaaaatacataaatgaatgtggctgtgttccaataaaattttgtttacaaaacatgttaaaggtcagatttggctagtgtgtcacagtttgccaaaacccgccttagaaaattaaataatcttgggagggcctattagacaaggttcaggtagtgctttgaaaaggtacatcgactatttgcattatatcttagtattgaatcatttttctcagatcatgtatagttcatgagatcttatccaagctactcatacttcagtttcctcacttgctgaatagggataatttttagagatctttggagtattgtaagcattcagttggttagtattcaaaaaatgtttattctttccaactttcattgtattcttattctcattcaaaaaggtgagagatgatctcacactgtctgtaacaaaatctgcttgagaaaataaagctgcttgcctaagttggaggcagagatcgactgacttaaacagcaggaggttcaaggagaaaagaacaattgcccacgtttttttcttagtgtaacaaaagtcctgctgcgatgtccgatctggtctggggcttctctggcacagccaagacaagcatggaatgagctatgtctttatttcatttgccagatgtgacttgaactataagaacatctctggagactgaaaaggctcagtgatttttacaaacaagtggctgaggccactagcccactttatttccccaactgtgtgatgttcacctgtcagtgtaagcttgagctgtaggcatgcaagaagaggtcatgctaatggtgataaagaaggctgagctgggatctatccagggaagataataaaacccaatgagcttattgggagaaaaatatttacttaggaagattttatcacacaatgtcctgggagaagaatttaaccagaaacacaaatgccttaaactggattctccagaatacatcaggagttgtatgtagaaggtttattaaggcatgctcttagaaggtgaacctgtaaggaagtgaggagcaatattgggcaaacagaaaagctgaccccagtgccattatgaagggggtctcagctgaccccacagggagctcggaactgggatggtcttttgagctgttgcaattgaaacaagggggccagactcctgtgtttttacattaatcagtcgtgtccacagccatcccctggaagatggtgtaatgttggaagagatagttccttgaagccaagagaaattccaatgagggaagaaattctgagccatcagtattcactgtttccatcacctggagaatgggtatgttaaccctgaagagcatcttctatacccaattggtatagatagggcttcacatttcctcaactgcatttcaactatgtaactattaataaaaaggaagtgtacttatttatgttcattgttgatgctgattgcagatttctctggctatgctcatagcaggacctgttagttatctatggctatataatgaattacctgaaacttaatggcataagacaacaaacacttattatctcagtttctctgagtcaggaatccaggctgtagcttaagctgagtgcctctgactcaggatctcatgaggctgcaatcaagatatcagctggggctgctgtcatctcaaggcttgactggagaggatccgcttccaagctccctcatgtgggtgctggtaggaggtctcaggtcttcactggctgttgctgggtaagcaacaatcgcttgcttgccatgtggcttcatccacaggattgctaacagcttggcagctatctgctgccagagttggaatctgaagaaaggaagaaaggaggaaggggggagggtgacaggaaggaagagagagagaggagatagaaaagaaagggaaagaggagaaagagagagagaaaaaaagagagaaaaaagagagggagagaaagagagagaaaaaggagagagagagaagaaagagaaaggggaaagagggagaagaatagagagacaaagaaagagaagaaaaagagagtggagagaaagagagagagagagaccctgacatagagagagagagagagagagagaaacaaaacagagagagaacctgagcccaagacagaagccaaggtatttttataacctaattgcataattgacatctcatcaggtctgctatcttctattcattataagtgagttaataattctagcctacattccaggagagagttgtatagagcttgatgacagtaggtgaggaccatctgagccatcttagatgctgcctacctcatagaagaattaaaaatatttttgaagaaaaattagtaagaccattctgaagcacaatcaatcaaatgtacctattaaaaatttttaaaaatcattgtaggacacactgaatttgggttaggatgatatccaatgtgtagaccctcagtgaattaaaataaagaaagaaactgctagccatctgcatgagataagtacagaaattgaaaacaaaccttaagaaattttatgttacttgacatccaagtgcatgttcaatggattcatctcattaactgggtacagaacaaaaatattggctcataagggatttggaaagaaaactcattcctcaccacagaatctgagaagccctgctacaacgatgtaacacccttgccaggtgggccactctagggcagaggaataagcttaggttgtggcagatcactagacagagagtcaggagatttggtactcattctgcctctgatatttcctaagaagaactgaatatcacttaacccacctagatttgtttcctggactgcaaacaaattgtgttaattacaaggttcctttgaagtctaaaggatattaatttgttaagcagtcccttctataattagacaaactaatgtattagcaattttcccctgtgatttctacatctccgaatctgccatctgcagctatctagacctcactcaaattgacttacttctataaaatcctttccacctcatcatggcttcttaaatggttctagagacaatttggtagtctgtactgactcacagagcagagagtgatggccatcttcatagtaataatatcaataataatttttctctaaaaatacagttttaataaaataacttttttaaaatgagctatttaaattttttttactcaatagtgcttcataaatgtactgtttcagtttttagttatgttactaaactccagaatttactaaattttattcagtagaggtatttagagctcttctgtcgtcctgttcctattcctcctcatagcaaatgaagattgctctgggaagtgtatgtcctaaacatctgtcagcaaagactcttgggtgattggtacagaaatcatcctataggtcaatgttcttaaatgtggagtttttgtggctagcagactcttccatggtcagtacatgcagcataatctagagaagtataattataataattgtaataataatagcagtgattatcccttgataaaatagtatgtgcccagtgctgtgctaagtattttctgtgtatcacttcattcctcctaaaaagtcacttaatatctctgaaataggtactggcatcttcattttacagataagagagctgaggcttgaaagataaatcaacttcacccaaggagaggtaattaagtaatttctggagctaagatttaaacccactgtggttgactccagcatacagtcccagtttgagccttagctatgcctactctagaattcaggcctcctggccaggtctgaggaagcacccacgatggatctatctgcatgggacatcctaaaggaagagatgattatataaaatttcatgcaagaacaagaggcagtgtcagatgtcagcattttagacaacagtctgccacccatgaactctggtccattctcttcaacttgagtagcagtgttgtgcaggggctatgattttgctaaggcacccagagtgtgaagtaactttgttctgtggtctatgtaaccaagcacacagagccctttcttcgtgtggggtacagtggaagcatagcactgatgtaattccctgagctgtgctctgggagagctacatctggagaagaaaagaaaaaggagagggcttaggtacctgtctatgcaggcattgttgggatataaggcagaatctccaggaaacatggagcagtacttgtggattgtgaaggagcaatggaaagagtagattccacctcctgcttgagagcttatgagactctccctgaggacccccagaactacttgtgcagagtttggaagaactgggaagaactaaaggaaggcatgttttattaatatccagaatgtagttctcaaaaaaaaaaagtttcatgtctatcaatgctttctaagattgtattaggttttatttttaactactatattttggttcttatggaataatattaactccattaaccatgaaagtctttatttgtatgattagacatgaagtctgttatggctattgtaccttaatataaattacctgatctcagtcacacatcttacattggcctctcgtaaatctagttgattttagccagttattccaatttatgaaggatattttgactcatgattctaccagaaaacattttagttctcttccagcttttatagtttataaatctaatgaatatacttatcaatctgtgtattatttcttgatataaaatacaagagacctcagcttagagccaaatttcatcaagcccagataacatcagccaaacttcagcaaaccgatagtgagtgagaaacataatttttttctcactaaaaatgtcttgtaatagtcaaaggtcaatgtcagagacctgacacatcctcagccagtttcacgcaggttgtcactaaacctcttcccagtatgttgtgattgttcaacacactatactttcatgtacctgtgatatcacctggcccagatttccctaaatcctccataattatattgtgcataatgttgtcaaataccttgcagaaatcaagatgcattgcctttagatagaactctcttaaaaatactagatttgtttttgtttggaatgactgattttttgccaactgagtttcaacggcagcatgtgtagggcttatatttcaaatttcaaagtcaagacttatctaatttttctttgccaacatggagacaggtgttatggaagacacactttggaaatagtgtggataataccctttaggaatttgctgcccttaagagaagttggcatagacacaaaagtgtgaaatgtcctgtagaaaggtacagatcctgtgctttgggaattaagatggtggagagatcatcttctgcatgattcatcagagtaaccttcctttcagaagttgtaattaagctgtctctggttgtgtgtgtgtgtgtgtgtgtgtgtgtgtgtgtgtgtgtgtgttagtttgggttttcccagaagtagactctgaaataaggagtcaaacaccagtagagaggtagaaaagtgagacaaagaagggagaacagtcagtgaggttcacatatgaagaaagttaccacagtgggcaacttaagtccttatgggaagccctgggaagggttgttgagcaagcactttagatgaattttctccaaaggatgagaaagctgcggtttttatgcattattcctgacacccataggttgaggctgctcctgggggaggagggcgttaattctctggcattttctgcttgcctgtgcaaggtcagaattggtttccttggccagagaaaggccacagacaaagagaggccaagtgctgacacgttggaagttaagccagtgagtgtgaaatggcaaagatgaagcagagcttcacacatagtgtgtgcttatgtgtgtgtttgtgtgtgtgtgtgtgtgtgtgtgtgtacatgaaaatgaagatatccaaagaaggagaagatcttccaagctgagagaacaataatttatcaggagcaaagtatacatgaaatgatttaagagaaattagatgataaggatgcatcaaaatccacattgcctggataacgaaatgtatctaacattccttaattccacaatgggattaggaattgtcgatatcctcctggcaggcctggcaaaatgctgattgtttctaattaaaatgaaataataaaataatgaagctagaatttgcgaggcacaccagaattttccatccataccctcaacctgtactgaattctgagctgtcaatttggcaagagagaacgcccagctccttggaaggcattttgttttcctcttaaactcatcaggaaaggtaagagtactctgggtaaagaaggcaacctggttatgttatcttaaatatggattcctactgccttctgttactcgtacctttttttcacttaagcatgctatacagtatgctctagaatctagagtttagaatataaagtctagatccaataacctatttgttgtttgatagtaattaaaaagcattgcccttataagacattacacagtgttaaaagtccttttctacttagagaatactagttttattttctttgcaattacagttctgcatatttatatattctttcaaaatgttattcaaaactagatttttttctatatgagaatcagaatttatactccactgataaaacatagattctgactgtatttctctgaaagtgctttcatataaagcttttggtttagaatgatccataatgtatggcaaattcggtggttatttgacagaattggagcttaggatactgcaaggctggagcgatgcagtgagccaggaagtgtcccctgggaacagaaggtagtggtagtacagcagctagtaatttttttttttaatctgatatcttctgaaagaaaaaaagcacttcttctatcatcttcaagacaacactaatagccttagagctgctgattctttaggcagtaaaacacattttttttttccttcaacacacacattcatcttgtctatggctctttggagacatctcaactttgacatcatcttttctccatcgtatttccagatcaccctctctgggcagtagattgttctgtctaaatataagtttcatcatgttacgaccatcactcaccttaagaccttcaccccccctttcagaaaagttatctatattctattttaatgaatcatgttgttcttaaaatagtttatttttttaaatccagagttaaattaggaaaatatgtaatatagagagttttttatattaaacttattgaatttaaaggacttcatgttattctggggttattattttttgttttaaaatttgcaagtatattctctttattaaatgactgtatattaggagaggctttatcaggtgcagaaataaacccccaaatctcaaaagcttaacatgaaagttgatctctcattcactcaaagactgctgctggtctagaggaattttcaggaatcatttttccaagcagtaatgaaagattttagactacttgcctacccattttagcaatgccatctgaaacatgtggccccccagggtcactatgaaaagagctggaaaatacactggaacttatctctgccttagcactaaagtgatccacatcccagactactggccacaacaagtcttgtggcccaaggtaaagtcaaggagtgaaaagtgtagtttttaagtttaagttaagtccaggaagggatgcttgagatataaaatagttttcactgggaatttctgctacagagatttgttccttaatgccatgttatgataacagaaaaaaaattaacaccctatgtgagcaccccactcatttggggataatttcttggtgcatgaaatgccaaaatttggtaactaccaatgcattctgtaaaatataaacatcacagccagaaccatcacatggttcttcaagctctgacctggccaatatctccaggcttatctatggacacccccaatatgaatcatacttcctagtttgtgtcattgcagtttactaacatatgcccatgttccagtcatgccctacaccttgttccattttccctttaagtctcttattgaacatctcctggttggggatgccatgcctgattctttcagacacagccaatgcattcatatcctcctgtaaacatggatgcccctttagatctttgtgggtgtgtgtggatgagaaaataactttacttcattttggtgaatgggaagatgtccatagtcagaacttctgaaattgtttcttggtgttggacactttggtgaccttgagcatgttgaagtgtacagtcttgctcaggggctggtactcacccactgtgacaatgtcaccgatctggatgtccctgagtgggagaataggtacacaggcatattctcatggcacttctcaacacaattatacttggacatgtagtgcacacagtctgggcagatgacaatggttctctgactcttcattttgttcaccatgccaaacagaatcctctctcaaatggagatgttaccagtgaagggaaatttcttgtcagtctaggtgccctcagtgtcctttttgggtgtcttgaagcccagaccaatgttcttttactaccgcgggagcttctccttcccagtttctctcagcaggactttttttgttttgaaagatggttggctgtttttgatagcctcactctgtcttaagtctgctatcttttctgcttcctgaataaaaagcctactttagttcattgttttgtagacatccttgaatcatcaaataggccatgagttctttgagtaaaggcgttgagttttactcatctccgtaattccagaatccaccagactgcaggacttagtgcttggtaaacactgaaggaaaacttggctctgttgatcaaagctctccttgtttatattttaatcagattttttgaaagggtctcaaagaatggttaaactctaccaagtctactgtcccttggcttatgtagcttctgaaagtcatatattcatcagctcttaccttatttcctccccaccaccatcttgacctatgcaattggtgaggccacagacccctagcatgaggccctgtttttcccacagcaatgggatttatgaaatcattcgaacttctctgtctggtggggtttgtgttgatgctgctgtgttgcagtgaacaggcgaatagggtcctcttttcagaaattgtacaaagctgtggtaaatttgattttcattatgatctgatggcacaatcaagtagcagttttcagcttactgattgtaacatgagaggaccacactcatttccttcagtaaatgttcaccaggaatctctgcaaagatgcaatggaagactgagacataagtagaattcccttgagaagtgttcacagaacttaacttacttgattacattgcatactcactttttgcaaagctacaatatggatgaggaaatgtcttaacctgctggactcataatagattacatacatgctggagttagaaagaagatgaacgagacagcctaaggaataaagctacaagacaaatggtcctctaagcgagggaccacgatcaaggagtgaactcacagaagaaaataaatcattgactcatctcctcatgctccttaacagctactggcaagttggttattaaatgaaccttgataactttggaaaactagtcaagtaccaagcaagacacaatttgtgattcttggcatggcttgtattactggctccctgtgcccgggacagtattgaaaggagaagtatctataaacagaatgaataatgtgcagccataatatattctttgtttatttttacatcaaatgtttggaatgttggcactattaagaaactcatttaattttgattcccttttgaacctgtgatgttataatgcaagcccccgaaatgagccatattcctagtgacgaaaattgggtgctggtgccataattataccaatgttggttttgataagtctcttttaattaacagaatctttgaagtttgctggcaatttttattttgtgaaaaggccagtaataataacagaaaggtacccgtttaaaattgtccacctggtctacttcttaaagcttttcatctttggattgatttgcacgtcatgaccaattatggaggtgggaagattctattatactcattttgcagatgaggaaattgaaactgggagctttggggacttgccggagcaggtgagaatgactctcacaccgagactcctagagacatcccgctccctgataatcacagtggttcagttctcagaacacgggctttccttaccttgccactattgacacttggagccagataattcttggttgtgaggatctgtcctgtgtgttgtagtatgttttgtaacatctttcctttgcctacaaggtgccagtagcaatccccctagttatgtctccaaacattgcctaaaatctccaggaggacaacatcatctgattgaaaaccacttgactaatggaatcgggctccatgacaaacggcttctcccgtttacctggtttactctttcctgtctgcgtgccaacaggggcctcaattttttttgtgtgtgtgacaaattataaaaagctacagtgaatttgccttgcactacgtcctgacagcataatcaaataacagttttcaacctactgcctgcacagcaagaagacaaagtgtgtaaggacgggagccacattttttttcctttaataaatcttcgttcagtgaatgaaaaagtggattgctgctgctaaccacgagccaagcaggttacagactctacacacattatacagtttcattccccaaccacctatgcattacatattaaaaggcctgtttctgaaaggcagagtgtagaggatttgtagggcagtgaaaaggtatccataatcagtgatctattgccaaaccttaacaggaagtcacatggccaaggagaacacggtttgtggagttccagcaccagcctcaaagcagagcatggaagggtaagtttccagctcagagacaattgcttcatattgggcacaatttcttgtactttcttccagagtatatgggtattttattttcttatatttgtttgtttgtttgttttaatgtcgcactattccctctttgtcttttgttggtattttaaagacttttctaaatcaacccaaatctacttcttttctttgttgcagtttattccattatctggataaacagctctgtaaatgagcacctggcagctgctgcttctccttttccctctccttccccttctcttcctttttttttttttttcactcttttgctctctcattctccttctctttctccatcatcatgcttttgcatatatgaaagtatatctaaaaaaatctagagcaatttggtgggactaagggcacatgttttaattttcaaacacattaccaaattgccgtttaaaaatatagtaatctatttttaccttcaatgtttgaatatattttttatcacaatcttaccaacatggtataaaaatatacttaaaatatgttcttcatttttaaggtaggaaattatgtcacattgctatattattttggattttaaaattttgtataatattcaacattggttcatttattgtaaatctttgcattcttttgcttgtttaaatccttgctcactttttcttattgatgtataaaatctttttacaaactgaggacaattgtaatatgaattatgaatatttcccttgcttgttatcacctctcttctgactttgttctttagatataatgttttttaattagtgatacagtttggacattccctccaactctcatgttgattggtaatccccagtgttggaggtggggcctagtaggaggtgactggatcatggaagtgtatttcgcatgaatggtttagtactattcctttggtgctgtccttgtgacagtgagtgaattcttgtaagatctgattgtttaaaagggtgtggcatcttctccttgctctctcttgctcctgttctcaccaagtaatgtgcctgctcctatcttgccttctgccatgagtaaaagctccctgaggcctccccagatgcagagcagatgccagcaccatgcttcctgtagagcttgcagaactatgagccaattaaccctcttttctttacaaattacccagtctcagatatttctttatagtgatgcaagaatagcctaaaacaattagaaagttttatacatttctcattacaaattatgttacacattaccaaggttcttttctagaactttctgtttaattacattaaagagtaatttaatgtgcaatttatattgagataaagaataagatccaaatttaaattattttgagaagacaaatcaggtttttcttaaacaatacaacataactgatttcaaatgttgcctttgatatatgttcaactcctgtgtgcattttgcataatttctgaactctattatgttctactgatcagaacatgttattgccaggatgtcattttaaaaaaaatgaatgagttactaggggatatttttttaatgctgatttggatccaaagccaaatggaaaattttaggagtttcctccagtggacttttttcgaagtgatcttttaaaatttaacttcaatagaaatgtgttgatttatcttatagatctttcacttactgctttgaagttttctctttgtgtaggacattgtctctgtttagtggggttgtcagatggtttacatcatcttcatttgttcccttaagaaacatttttttttgagctactactatatctagggcattgttctaaatgctagggatacagcactgagcaattcagaataggtctttgcagtgatattgtagtgggtggagacaggccctgattttttaaaataacagaattcagatgtatcaagggctatgatataaataatcagagccacaacatagagagtaattgaggtggggccaggtgagataaagtgtcagtgaactctctgaggaggtgatgtctcggtttgatgtctgacagctataaagggagttgtcatgtttctgttcttcggtgcagtgtccaggactgtgcttgtcatatactgtttcttgacagatatttactgaatgaaccaatcaatcagtgatggctggaggttctggccttggctgtgggaagcacttcatgttgcctttaagcttctattatgacaagctgtttagacaagttaagtggtaggtttttactttggggaggaaagagatttttcctcagtctttattcattacttattgcaaaagggatttcgcaatgactgatttcaacatttctccctgggcttccaaaccaccctggtccttagcaagcccaagcaagtttccaaacacagggtttttccttcaagcccgacctcccaatctgccatgagagagctttgcacatgcacacctgtgtggggcacagcacggaagtgagaaggaagttgaaaacaagcccggaggacctaggtgatatgttttcagaatgttgcctctcccaaaatatttcctgtggatcaaaatgtcttgcttagacatggtatctgtggctccatttgcagtggatgatacaccagccccatcttgtgcttctctaaaaatctttccactgtataattttcaaaacaaagaaattcagactagcttaagacacttgcttttcattgatgacttgagtaacaaaatataaaatgaaaaatcagaatggatgaaaaggtgaatgtttgtatcttccatcgattgcttcatctactgtctttttgttgaggggatttgtttttaagattgaaagccattggcttatttatttattttttttttgctatggtttctcttcatgattattgatctctattagcatgataattataaatacttgataaatttctttctttgatctggcctacttgtcactcaacagtcttttaaactctagattctttctttcattcttgacatttgccattgtcctccaccctgaatgcctccctgctgttctcaaaagctgcctagaatcattgagagagtatattgcggtatcaagtaccatggcttcaggctccgctgcagctgcctgctttctgaaagctccctttattctttgcaactgcacttatcgaattccgcctaacaaatgtcagcttttttccccttacctttcatgcaaaacacacacacacacacacacacacacacacacacacacagtgtaataaatccttacctctgcacagtgtacatttatacaccttgtaattgcctttctctgttggttttagtcctttgcccttttattctttccttttgtactctggcttcctcagctctagtattcccagccttgaaatccaaattgcaaatgcagaaaatatgcccacccatttaggacaaactgaatgactccaattgtagagggtagcactgcgtctggtggtacagctcactaaaagcactcattgcctggttcataagaaagtagcaggtcttgtattcaagactaagaatctgtgaacttcagagcacactgtggagcttcatggaggtgtgcaataaattaatatattgtagtatatctatatataaactatatatacagtatagcatatttgtggtaatatgtagtatttttccaccggccaccatatgcacccacatgaaaaaagctggaaagtttgtcgactgagtgtatgattctctgctgctcctctgatattctttttgctggttttaagtaacagcagttattaggaccagccatgttttcctgcatagaataaacacttgatgagagtggccttgaggaggtcaattaaagcagatgtaaagattatcctgcctctattgagttgaaaataggagctaaaagagctcttcacttaactgcaggccattaggcaagaattaaggctttccttataaggaaactggagttattctgaagtcatatttgttgttttatagaacaattcaaatgaccattaaattctttcagagctatgagcaccaaggccccctgaggaatgtgaatggacctttttttccccaaacctcaaggattctaggagctgaataggactttagagacaggactggatagggaattcctaagggctttttttaagccaatattccatgactctctgacctaaccctttgctactcaaagagtatagtagtccatacaccaggaacatcagcatcacaggcaccacatgagaataggttagaaatgcaacatcttaggcctcacttccacctgctacatcaaaatttgcattgtaacacgatctccaagtaattcatgtgcacatgagaatttgagacaccctgatctactctaatctcttttttccccaaataataaaaatgaaataaatttcccaaggtcactaagtaaattagtagctaggataactaagaaagcattacattagtcaagctgtccattctggataacaatctcctttttccaggcatctagttcttcacctatatgtcctggagttggcctatgtaacccaggaccatctatctccagatatctgtagacattctcgaagtcacctcctccatcaggactttctgtgttggcagagacgtgctatgtgtgcactgaccacttgtgcctgttgagtacctgaaatgaggctggtgggtctggaaagctggaggaggaatgagagctccatctctagtgcatgttcatcactcaactctaacgtgaaaagaggagtttcagggcttctgtttggataattctgcatggtggtaatagctttcaggaagacttcactagaaaaaaactctaggttattgatacagacaggagacagggaaatattgggtagaagagggcagtaccccagcaaacaccccatcctcaagcctgaaaacccatggccctaaatgaggataggcatttctgttttcattgccaaaaagtggccctttggccagccatgccccctatcctgcacccatataaaccctgaaccccaaactccagagcagaccagcaagcagcaagccagcagaccaccagagagatggcagaatgatgcggcagagaaagggagaagagggttggtcagagaggagtccaactgctgggcggcccagctccgggggaggatcacctacccactccatcccccacttccagatctccatccatcacactgaaagcctcctctaccacttaataacacctcacattcatccttcgggtctgtgtgtgacccaatttttccgggactctggacaagaactcaggatacagaaagctgttacactggccctctgcttttgtgaaaagacagagggcctattgaggtgattaacacccaagccatctgtggccaacaaagctgaaagagctttgtaacactggagttgcaggtacccactcctagacactacctgggagctggagctggagcccggagagctcgcctgagcctctgcacctgcctgtctgcatgctcccctgtccctcaaggggttttgagccacacccctgtcgcaggtcctgcgaggagaatcagggaactctcttgttttattatcatttttgaactgggaaaaagagcaaagaatctttagggtcatctttgaaactcacagtttgttggataaaatgtaaacaatctagtaacttgcggcttcttaggcaaatgtaatgtccctgttcttgtgtttgttctgaggattttccatttaaaaaaaaatgaatgtttgtgtactgcttatgatttacctggctgtgaagttttaaattgtctaacttaatgagtgaagctttaaattgtctaacttaaaaaacacatttcaaaacgtttcagagagaatcatgcagactcatctagtcatcatctggttgtgttgactaatggccaaattttccattttttcattgctgccagtttccatacacctctgcaatgtgattttgtagcaaaaattgatgtctatgtccacacctataaatttactttatgatgtactttgtaaatgtaaacatgcagtataatacattggaagcaatgaagtgccagttctgaaccgaggcccaaatggctttgtgtacttccattcttttagagaacctgccattgatgtggacaagtctgcactagcctctggaagacgaaaaggtccaggcattagaaaagaccccaagccattctacctgtcccagctgagtcccacacagaccagccatcccccagctacacacaggtttactgcaagcatgcgagtaaatccagtgaagttcaacaacacccagccaaaatcagccaaattgtctagtctacttccagatttgtgaaaatagtaagtagtgctgattttaagcaaccaagtttgggagtgatttgttacaagattattatgactatagaggactgctatgccaatgttgtcatattttaacattttcaatgttatttcacctttctaaagagaaaagtggactttgaggccatgatgagattaagttccttaggattagagtcttttaaagagggaaggacattagaattagtcctcaactatagacagagttttatggctgagaaaatggaggcctagagaggggaaacaagtaccattgtatcaccctgccagtcaggagcagaacaggacacaggtctcctgtctccaaagtctttgcaagtcctcagtccgttctttcatgaatatgctctgagttttgcttgtctgccaaccagcaagtctttgaaaacatagctttaagaaaggagattacagttacagagaccaatgcttccgactttacaatctgattcttcagtttctaaaggccctcttgattctttgttaaaagaaatccccactttgccatttgtcttttatgaaaagattagtggatagcttttaccatcaccatagcaccgcttacttaatcaaccactatgttctatttgtaatttgtcaaagatgttggatgttataataaaaaaaaagtcttgaacgtggtgcattttctactcaccattgagtgaatttcttccctggagtgtgttcacttccctggcaagttagtgactcagcttgtcttcttgcttctattctttttaaactctggtggtcacgctttacatctcagagattataacatattttcacgtaaattatctgatttgaatttcccaataacccatttccatctccatgagaaaattaaggcttaaggcagttgtgtggttagcaccaggtcaagtggactggaaagagaagggctatgccaagcttctcgatttctgtagtctgattttctactgatgatgtcactttgccaatttacagtctgcacctgttgggtttgtttaagtgccagtcatgtccaattttccccttcttgctgaaatgccctggtccaaagacccttcctaaggaagtagccctgggcttttcttggcagagaggttgtccatgatggatgatctcaggtccagagcccttctctttgctgggccaggatttaaactgaaaatatgagggagagaggaatctgtgagtctgaagaatatgaaaggaaaacctagagagagattataggcaacccgttgttctactctgttctttggcgctttctgtttccagttccaatccattcatgtccttaaactctgttttccttatgaggacttgaattcaattcacacagtcacctttcctttgtatggcattttatttttttaaaaaatagtagtgccatttcataaacaaaatcaatctgttaagggacttgcaatcaattattattattatcatttcatgaggaataaatatagctttgaaaggagattaagtgacttgcttaaggtcacacaacaatataataaaatttaagcttagttctctcactactaagtcctaagaactttgggattaaaaaacatgatatggaacatttttagtaggctacatatagtatgtctctcaattttctttactgaaaaatctgcaacaatcacctcggggattacgtcagaggagaatttggagcctcacagaactgctcaaaaaatcctgctgccagcagtttgttgatatttcaaggcagggtacatatcacgtcccactctctataccacactgagcttttgccttcttgaaggctattcaacaacactcaacactttagttgcaaatcacaaaaccatcttccaagtttcacctaacaatgtcaaaggccccattgcccctatatttctccaaaggaaacatagagccatagagctttcttgtaaacacacagttgacaattgctctgatagtgcagaattcctaaggtgaatatatatatatatattcagtggatgtttatttatatgctgtatgtcatatttatgaaatgctccatgagatgtcaaataaactggtatatggttctttgaacactaaacatccactgtatatttttgataaggaggaaagttatggccttgagattgtgccttgcacacctttgactatagggagagtcattgaccaaggatctcaattgctgtagactgacatccatcaccttctttgcattgaagctactctccacgaataactgagcatggtaggaatactaagggaggccagtttctggaagacatggggttcctctgacagccaactttggctcaggacctctttgccaagcttgccaaactttccttagattacacagttgtcttgggtacttccatacaatcttccttctctctttctctccctcatgggattccaacctgcatctcaatctaacagttctcccagccttccctgactcaccctgatttttctcaagacattttttctaataaaatctttgcctagctaattgcaccttggtcttcttggaggaactggcaggaagcagatgagtgttatatgtttaagtcagcagccactatatgtatatatactttgatatagcaactttgatactaaaaatcaattttaaaaattattatagactctgaagatggttctagtcttggtcagataccaataagtgcctgctcttcccatatttatcctcagattacaaagaatccaagagcctaggcacagctgctgacagaggctgatacaccaaatctgtaccatgcaagtagtgagcaagataagacaatggaagatgtggtccactgaagcatcttgtccaaaatgcttttgtatcatagaagtctctttctatacctacggcctcaaggaaagcagaagtgacagaggcagattgttttaaatccaacgccctgagtagaaatttgggcaggaatacctcacccacacccaaaggacaaaacttcctcccccttcctgctggtctcagctgctgatccaaactgaacagagagggagcagggaaaccattactcttcttttttctcacagctcttgccaagatgggaattgattccaattgtgttccagaaagaacactgtctataactcagttcacttcagcctgatgcattcccaaacctttattaagcagccctataaatggcagagtattaaatcctgaagctttccttctttatttgcttcaatccaatgtaaaagcagcactacttggctttcccttttttccaataatttatttatattttgcctaattctatattctatctaatcagttcctgttagagtagattggattgaagctatgctgtagacttaagcatcatttcccaaattttaataagcatactgaactactgaggatcttgttaaaatacagattctagttccataggtcattggttagggactaagttcttgctttcctaacaagttgagaggggaccaaattgatggtgtgaagctgaggccctaaagccatgcttctcaaactttagcatgcctcagaatcacctgaagaggttattaaaaatagattcctggacctcacaccagagatattgattcaggagtactggggtgaaactcaagattttgcattttttttggtaattgatgagtttaatttaataacttggaggtttataaaatttctgttattttactttaggttctggtatacatgtgcagaatgtgcaggtttgttacataggtatatgtgtgccatggtggtgtgctacacctaatgacctgtcctctaagtttcctcccatcaccccccaacccccaacagcccctaatgtgtgatattccctctctgtgtccatgttttcttattgttcaactcccacttatgagtgagagcatgcggtatttggttttctgttcctctgttagtttgctgaggatgatggcttccagcttcatccatgtccctgcaaagaacatgatctcattcctttctatggctgcatagtattccatagtgtatatgtgccacattttcttcatccagtctattattgatggacatttgggttggttccatgtctttgttattgtaaatagtgctgcaataaacatacctgtgcatgtgtctttatagtagaattatttatattcctttgggtatatatacagtaatgggattgctgggtcaaatggtattcctggttctagattcttaaggaattgccatacggtcttcaacaatggttgaactaatttacattcccaccaacagtgtgaaagcattcctatttctccacagcctcaccaggatctattgtttcttgactttttaataatcaccattctgactggtgtgagatgttatctcatggtggttttgatttgcatttctctgatgatcagtgatgatgagcttttttgcatatgtttgttgcccacataaatgtcttattttaagaagtgtctgtttatatcctttgcccactttttgatggggttgtttgtttttttcttgtaaatttgtttaagtcccttgtaaattctggatgttagacctttgtcaaatgggtagattgcaaaaattttctcccattctgtaggttgcctgttcactctgatgatagtttcttttgctgtacagaagctctttagtttaatagaatctcatttgccaattttgactttgttgctattgtttttggtgtttttgtcatgaagtctctgcccatgcctatgtcctgaatggtattgcctaggtttttttctagggtttctatggttttgggttttatatttaagtctttaatccatcttgagttaatttttgtaaaaggtataaggaaggggtccagtttcagttttctgcatatggctagccagttttcccagcaccatttactgaataggagattctttccccattgcttgtttttgtcaggtcggtcgaagatcagatggttgtagatgtgtggtgttatttctgaggtctctgttctgctccattggtctatatgtctgttttggtaccagtaccatgctgttttggttactgtaaccctgtagtatagtttgaagtcaggtagcatgatgtctccagctttgttctttttgcttaggattgtcttggctatgtagggtcttctttgactctatataaaatttaaaatagttttttctaattctgtgaagaatgtcaatggttgtttgatgggaataacattgaatctatgaattacttggggcagtatgaccattttcatgatgttgattcttcctatccatgaggatgaaatgtttttctatttgtttgtgtcctctcatttctttgagcagtggtttgtagttctccttgaagaggtccttatatcccttgttagctgtattccaaggtattttattctctttgtagcaattgttaatgggagtttattcatgatttcactctctgcttgtctattgttggtgtaaaggaacacttgtgatttttgcacattgatattgtatcctgagacatgctgaagttgctgatcagtttaatgagttgttgagttgagatgatgggttttctaagtatagaatcacgtcatctgcaaacagagacaattggacttcctctcttcctatttgaacaccctttatttctttctctttcctgattgccctggccagaacttccagtactatgttcaataggagtggtgagagagggcatccttctcttgtaccggttttcttttcttttttttttttttttttttttgagatggagtctcgctctgtcacccaggctggagtgcagtggcttgatcttagctcactgcaacctccacccaccgggttcaagcagttctcctgtctcagcctcccgagtagctgggattacaggcgcctgccaccgcgcccgggtaatttttgtatttttagtagagatggggtttcaccatgttggccaggttaaactcctgaccttgtgatccacccacctcggcctcccaaaaggctgggattacaggcatgaaccaccacgcccagcctgtactggttttcaaagggaatgcttccagcttttgcccattcaatatgatattggctgtgtgtttgtcatgaagagattttattattttgagatatgttccatcaatacctagtttattcagagtttttgacatgaagggatgttgaattttatcaaaggccttttctgcatctattgaggtaatcatgtggttttagtctttcgttttgtttatgttatggattacatttcttgtttgcctatgttgaaccagccttgcatcccagggatgaagctgacttgatcgtggtagataagttttttgatgtgctgctggatttggtttgccagtatttgatgatttttgcatcgatgttcatcagggatattggcctgaactttcctttttgtgtctcttcctggttttggtatcaggatgatggtggcttcacaaaatgagttagggaggagtccctccttttcaattgtttgaaatagtttcagaaagaatggtaccatcttctcactgtaactggtagaattcagctgtgaatctgtctggtcctgggctttttttgttggtaggctatcaattaatgcctcaagttcagaacttgttattggtctattcagggacttgacttcttcctggtttcgtcttgggagggtgtaggtgtccaggaatttatccatttcttctagattttctagtttatttgcatagaggtgtttataggattctctgatggtagtttgtatctctgtggggttagtggtgatatcccctttatcattttttattgtatccatttgattattctctattttcttctttattagtctagctagtagtttatccattttgttaatttaaaaaaaaaacagctcctggattcattgattttttggtgggtttttcatgtctctatctccttcagttcttctctgatcttagttatttcttgtcttctgctagcttttgtattagttagcacttgcttctccagcccttttaattgtgatgttagcgtgttgatttgagatcaatctagctttctgatgtgggcatttagtgctataaacttccctcgtaacactgctttagctgtgtcccagagtttctggtacattttctctttgttctcattggtttctaagaactccttgaattttgccttaatttcattatttaccccagagtcattcaggagcacattgttcaatttccatgtaattgtgtggttttgagtaaggctcttaatcctgagttctaatttgattgcactgtggtccgagagactgtttcttataattacagttctttagcatttgctgaggagtgttttacttccaattatgtggtcgattttagaataagtgccatgtggcactgagaagaatgtatattctgttgatttgaggtgggaagttctgtagatgtctattaggtccacttgatctagagctgagttcaagtcctgaatatccttgttaattttctgtctccttggtctgtccaatattgatagtagggtgttaaagtctcccactactattctgtgggagtcttagtctctttgtcggtctctaagaacttgttttttgaatctgggtgctcccgtattgggtgcatatatatttaggatagtaactcttcttgttgaattaattcctttaccgttatgtaatgcccttctttgtcttttttaatctttattggtttaaagtctgttttgtcataggctaggtttgaaatctctggggttttgttgttgctgttgttgttgttgttgttgtttgccttccatggtaaatattcctccatctctttgttttgagcctatgtgtgtctttgcatgtgaaatgggtctcctgaatatatcacaccaatgggtcttgactctttatccaatttgccagtctgtgtcttttacatgggggatttacccccatttacatttaaagttagtattgttatgtgtgaatttgatcctgtcatcatgatgctatctgatcattttgcacactagttgatgcagtttctttatgatgtcattggtctttatatttcggtctgtttttgcagtggctggtactagtttttcatttccaaatttagtgcttccttcagcgcctcttgcaaggcaggcctagtggtgatgaaatccctcagcatttgcttgtttggaaaagatttaatttctccttcgtttatgaagcttagtttggctaaatatgaaattctgggttgaaaattccttaagaatgttgaggtcaggagattgagaccatcctggctaacatggtgaaaccccatctctactaaaatacaaaaaaaaaaaaatagctgggggtggtggcaggtgcctgtagttccagttactcgggaggctgagacaggagaatggcgtgaacccgagagatggagcttgctgtgagccgagattgcaccactgcactccagcctgggcaacagagcgagactctgtctaaaaaaaaaaaaaaaacaaaaagttgaatactggcccccaatctctcctggcttgtagagtttctgctgagaggtctgctgttagtttgatgggcttccctgtgtaggtgacccggcctttctctctggctgctcttaatcctttttccttcatttcgaccttagagaatctgatgattatgtgctttggggttgatcttctcatggagtatcttaatgatgttttctttatttcctgaatttgcatcttggcctgtcttgctaggttagggaagttctcctggataatatcttgaagtatgttttccagcttccttccattctctccttctccttcaggtactcaatcaatagtaggttcagtctttttacttagtcccatatttcatagaggctttgttcattcctttttgttcttttctctctaatcttgtctgcatgccttatttcagcaaggtggtcttcaaactctgatattctttgctccacttcatgaatttggctatggatgcttgtgtatgcttcatgaagttcttgtgctgtgtttttcagctccatcaggtaatgtttgctttgctctaaactggttattccagttaccagttcctctaactttttatcaaggttcttgtcttctttgcattgggttagaacatgctcctttagcccagcagaattttttgttacccatcttctgaagccgacttctgtcaattcatccatttcaacctccgtccagttctgcacccttgctggggagatgttgcgatcatttggaggagaagaggcactctggccttttggattttcaatgttgtttcattgattctttctcattttgttaagtttgtctagtttcaaccttggaggctgctgaccctaagatggggtttttgtgagggctttttcttgttgatgatgatgctgctgttgttactttctgtttgtttttctttcaatggtcagatccctcttctgtagggctgctgctgtttgctgggcattcacttcaggccctattcatctggttcgcttccgtgcctggagatgtcactcaaggagaaggagaatagcaaagatgggtgcctgctccttcttctgggacctctgacctcaaggggcaccaacctgatgccagtaagatcactcacatatcgcgtatctgataacccctgttggagggtctcactctgttggtggcatggggaacaggacctgttttatgatgcactttgattgtcccttgatgaagggggtgtgctttgctggggggaaacccactcgtctgggctgcccagactcctcagaactaccaggaggaaaggctaagtctgctggtccacagagactgcaaccacctctcctgctaggggctcaggcctagggagatcagagttctgattttgcgtttctaataagctcccagatgatgccaatgcttctcatccctttgagtagcaaagatttagtgaacatatctaataggggtccgttagtgaactgatgagaaaagtgtcataaaccctaactctttttgttattgattttatttgcaggggaaagtggatttggaaaacctgctgaatatttttgcttgaggcagagtcttttttttctcctttttttttgagacacttatagacagtgcctcaaaaaaaaaagtggggggatcttaccttgtctttgttgctcacgctggagtgcagtggtatgatcacaaccacagcttcgacctcctgggctcaagcgatccttccacctcagcttcccaagtagctgggactactggcatgtgccaccgcgccaggcttatttatttatttatttatttatttatttatttatttatttatcttgtagagatggagtctcactgtgttgtccaggatgatctcaaactcctgggctcaaatgatcctcccacttcagcctcccaaagtgctaagaagaatacagttgtgagccaccttgccaagccttctattttcaaattgacctttgaatacaaggagaaatgtatgtgaataggggctataagtctgggaagtagatgaaaatcatgaaagatgggaaatagcacaggttttaaatcagagaaccctgattcaccgtagccgttctcccccaattttaacctttttcatcataaataaggcaacttgcattttatctctgctttagatctgcatgtaaggctgccaagacacaaacatggtactctaaatttaaatattgaaagctacctggcactgggaccatggacatttatcagaatcaggccccatttctgtggagactgcatgtgaaacattggctgactgtacatctctgcataatacaatagctccatattctcttcatgtcctgtgtgctagaaggtgtaactagtccattaaacgatggtcttatatatatatcttatgccaacttaatgagcagatgagaaagtcgaagctgaggataactgggtcacaggcctatttgtccaaaacctgtgctttagatctttgctactgaaagtgtggctggtaaaccagcagcatcagcgtcacctaggagatagttagaaatgctaaatctcaggttccatgcctgacctacttgatcagattctgattttaacaagatcccaggtgatcactgtgtattttagagcactgcttgggcacactctgacatattgcctccttaccaagaaagtatttttgcagagtcattttctttattggaaatactttagctcagatccagtgagacatcaaaggcagtcattttcatcaccagcaaagggatggtttgattgctttgggaggaggactgtttggcagcacatcagagttcagggggagctacatgtgctgacacaagcaatccctggctcacttgggctggacttgggaactgatgtgtagccatcatccaagagtaaattaggtcagacagcagggcttgctttcctagggccgctttttactaagggtgaaggcccaacatctgcaagggtcttcaagatggtagagttagattaagaaagagaagaatcatatctcacttggcttttggggattcaagtttctttctttctttctttctttttttttttttttttgagacagagtctcactctgtcgcccaggctggagtacactggcgcgatctcagctcactgcaacctctgcctcccaggttcaagtgattttcctgcctcagcctcccaagtagctggggttacagccagctaatttttgtattttttagtagggaaagggtttcaccatgttggccaagctagtctcaaactcctgacctcagatgatccacccgccttggcctcccaaagcactgggattacaggtgtgagccaccatgcccagcctccagtttcttttctatgaagaagagataatatgtggcagagaaatttagcatctgactgaaataggaaccatatcccccaaagggttttggacaacgttggacaactttagtcaagtctgccaacctccttctacttgatgggttgaaagaagagccatttattatttcttcacaaatctacaggtgaccagtggttctgtgaatctggctcaggctcagcttatcccgataaggtgctcttatgagtctcctttcagatcaccaggatgatctcagttggggcatctctgctctggtccatgtatctctcatcctcctgtaagctagcccaggtttgttcattttgtggctcagtgaaattccaagcaaatgagtataagcacgcacaacgtctgaggcctaagctgacctgatggattgttacttcagctgcattttactaaccaaagcaaatcaaaataccagtgtgtatttaaaggctggggaaataaactctactttttgactggagaagaagaaaggtcacattgtctaaggatatgataacagggagggtagagaattgaggccacgtttgcaatctgttgtgttcctactaactgcctcccactggttcttttttgaagcagtcattggtaccttggtctcaattccattttgttgttcatgggctgactgcttctcctggctagatgcatttggggccactgcattaatttaggggctctagttgagtaatttaaaaatgcaaaccatcaaatataataaagactggtggaaaaaagcagttaagagattgcatacttttcatataaattaaaatctcagtgggatagcagtatatgcctagaacgtgctaaatgaaaaaacaaagcaaaacaaaaaaaacagacaattgccatgtattgtcaaggatgtagaataattggaactctcatgcactgctggtgggcaggtagatcagtaccaccactttgtataactgtttggcattattcaatacagctgaggaatgtacatttcatgagccaaaaattcctcttctaggtatatacctagcagaaatgttaaataagtgcgccaagaacgcacatataggattttttgtaatagtgacaagcagaatatgcctcatgggtttgtcaaccatagaatgggtaaatatattattttatagtcttgtgatgaaatactatatagcagtaaaaatcaaagatttacaactctttataacattatgataaatttcacaaatgtaaggtaaaacaaaagaagtcaaaagaagacgtgctatatgattccatttatttaagctctcaaactggcaaaacaaattcattgtattaaaaacaagtagagtggttttctgtgggagacgagtgtcagggcaggaacaaaagaggcttctagggtgctggtaacgtttcttgatctgggggctgcttacacgaagtgtttgtgaagtaaaaatttcagcattttacaagtaaaactacggtactttttggtatgaattctatgcatgaataaaatggtgttaagaaaaagtgatagagaggaaataaacctgagttcaaatctagttctcctctgtgtccttgaagaacattcttgacttctctgagtaccaatttcttcagctgcacaatgacgatcatttaatattataatgatctttatgaggattgcattttaagagatatgtaaatctctctgtgtccaataaatattagttcctcctcctccttgctgtggaaaaagttgtatttactctcctagatgtgcacagtatagtgccttccttacaatattgcattagatcacattctgaatgttgcttccaaaaaaagcttctaacctcttcctattttattacttgtgagtgtgcatattatgagtcctggaggttctatcttaaatgggttatcgcttcatatgtcattctaccatcatggatggtgcttagttccttccttttgtttctgctgattcttttgctgttactgcatatctaaattttaagacattattaactgtcttttagatcaacaaattcctcaagggactttacagcagtaaagttgctactttaacaaatacagaaaatagtacaaaacctcattttgtctaatttaaggaggtagagtcatttatccttcagcaacaagctgcttcaaaattatcctgaggcacaaatgagtgaattatgcaggaacagcctgtcctggcttctgactgtctgtgccagaagcagaggcatagcacccgtggatgacaggagaccgcgagaaatcccaactcgtttcctttccttgttctcaggcactttggagccacttcattaggaaagaggtttagaggtaatttcagaaattttgagaaagttggctgctccccaaagctgttctctgtggcaatactcacatgtacatgctcatacactgtcacacattcgcacacattaatgcccatatacacacatgcactgtcgcacacgcatacagacacatacacacacatgcactgtcacacacatacacacatacattgtcacacacaaacacatacacacacacgtactgtcacatacatacacgcatacacactcaaatacacatatacacacatgcacacatgcattgcacacaaacgcatgcactgtcacacatacacactcaaatgaacacactcaaatacacacatatacacacatacacacatgcactgtcacacatgcatacatatactcacacacatgcaccgtcacacacacgcactgtcacatacatacacatactcacacatatacacacatacacacatgcagtcacacacaaacatacacgcactgtcacacatacatgcatacacgcttaaatacacacatacacacatacgcacatgtactgtcacacacatacacgtactcaaatacacacatatacacacatacaaacatgaactgtcacacacaatcatacatgcactgtcacacacatacacactcaaatacatatacacacatacacacatgcactgtcacacacaagcacatacacatgcactgtcacacacaaacacacacacatgcactgtcacacacatacacgcatatacactcaaatacacacatacacacatgcactgtcacacacatacatgcataaacacactcacatacactcacacacatacactgtcacacacacactgtcacacacactcacacacacactatcacacacacacacgtgaaactcatgtctaaagttccatgtggctaagattggttcttgtcagcccgccaataatgagaccttcgcagctttgatgagtggaaaaatactctaggggctcaatgagaggagaagctgactttgtctatttcacaattttccgcagacctcagctctgctctttagtataccgatctacaggagaagcagaaatcatgtagggaaggactaggatcgacagcaataaccagtgcaacaaagcactggatatatgccagggaatgtactgtagatttcatgaatattgtctgtgttctctgcaacagctctgtgaagtaagcagcactcttatccccagtatacagccaaggaaactgagcctctgagagggagactaataattcaaactcaagtctccacatcctaaccagcgactttttcttaggtattttactggagtccatttaaaaaagtagtactatgactatatacttaatattttgataggtgtaaggaagcaaaactaagaaaaaatatatgcatatgtaatgtaaatcatgaatacagtagagcggtggtatgctaagatggcatggggtttaagctggagttttgaaagagcattcatagataaaggaagttagaaaggaacttactggaagggattgaggatttggagaaaatgcacaaatgacaggtgacaggaagtcatctaacttcttctccatgattggtgagttgatgtgtgagactggaggccaacagcacctacatatcaggatcacttgctcaggtaactgccaaaattgaaacatcagatgttacctctggaggagggagaatagagaagtagagagaacacaccaaggattgaatttggggaaatgcccttgtttagtgaaaaggtggactaggagggtctgagaaacaggatttgagaaattaagtggtatcatataagaatcccagagagtcaagtttcaagaatattgctaatgggcaagaagaaaaaggatggagaattcctgcttatcgggccatttgatgattttagcgtatgctcttgcttgaggtggtggatgaggggttctgtagaaggtggatttcaggtcctatacagggtattttgtgagactatgaatggcatgatggtaggttatatacaatttgaaacatttaaaataataaagtgttaaaggtagaagacaggaagttttaacattattattattatggtttgatttttgtttgtcttttttccttgccttcttgctttctcttgtttttaagaagagaaaaaaatctgtgctatggacagaaagcaagaggaagcatcaaaggtgctgatggtgaaggaggatatgctatgagacaaaaccttgacaagatgtattggacagcagagcttctcacatttgaacaagcataagaatctctgggagaacatgtgaacgcagatacccaggccttcaccttgggagattttaaatgagtaggtctaaggtgggaccccaaaaacctgcatttctgatgagctatgctgatccggtgcactctgagcagatccatgcagcactttcaggcttcctttctctgcagctttcagcttcaagacaccctgggactctgccctctcttggctttctagaaataccacactattctaattcctcagtctcatttccaaagtcatctctttcctctttgtgtccttttcctctcaaactatgagatatccagggcttgactttctgaccacttgctttctgcaggatacatgtgaaaataatttatatcaatatttctagacggatccactggctcctcccaggccatgtattgtcattcctgctatatctacttggaaatctcttcctagttgtctgtgccttctaccttacctgaaaaacacctgtcctttatttctcccccaaatctagagtcttccttgactgatgtgggaccccacagtctctacccctcacagttcaacaaaggagggagtacttgtccgttcataacatcacaatccaaaatgtgctccttgattgaatctggatttgaaaatatcagtgttaaaaatatttgagaacaagcggggaaatttgatagtggactggggtgtgtaagatgttattaaaggattattaggtttttttgagtaacatattggggtcatgtgggaaaatgtactttttctagtagaaaaatagacctccaaactattttttagcttaaattgtcctgaccccatcacctaagcgatgtaataggggaacatgactaattcattagagttgctaaagctgtttgccatgccactgtgagcagtttaaaggataactaataaaatattaacttaggtggcatgtccagaggacacttaatataagactattttctttattagaaaagtgaatatggatatttttgaagtctgcttgaagataattctgactattcatttttttgtcctgaacagaatgtactctgaggttgaaaatggtcttgattttcaaaaatagagtagtctggatatagatcataaacatgtagctgagtgctgaaaagaaaaatgagattttgtaaaaaggggataattttcaagttgacaaacattggtgaacttcagggcccagggccatttcagaattcagagagattaacaagtaattacatttttattgagtgtctaggattgacagacctggggctgatggattcttgggaggttacagtctaggtgagtgggagacatgcatttgtggaatggtccagacaacagatggagtcactaagagctgccaacactgtaaagccctggtttacaaacttgactgcattttggactcgcatggagaggtttaaaaaatactgatgcctgggtcccaactcttgtgtgtctgatttagttgccctggggtgtgtcctgtgcatcggattttcaaaattccccaggtgaatctaatgtgcacttaaggctgagaacaagtgtacagaagtccaggatcaattccagctggagaatttgacttcctggactaggctctgtgcctgccctcgaggagctctctaattgttttactctttctcctcccctgcctctcatcatttgttctacttagaaatttttgtctttcttgcttgaaagtgaactaaccacaacaaacaaagggaaataaatgattattacacccaggcagcaaacaagcactaccaatgatagagatcttggtttatgcaagtagctcagtaaacaaatgctgtgttaaaagctgaaagaatgccctccctctactgctagaacaaaacatcatccatgtgtcggcctgtggtctgatgagtgattcaactttcttcctccgagactttgttggtgtctgatagatgccactagaggctatgttctattccagcctgtttgaaatgcaaagacttgcgtagcaaaattatctcactctaggaaaatagacaagtggtcagtaaactatggttctgtgggccaaatgcagcccacttactgttttgtaaatcaagtttcactggaacatagccatgcccattcatttacttattgtcaatggctgcttttgcactacagcgacagagttgaatagttgtgaaagagcctgactgacaggcctgcaaagccaaaaatgttgtctatctggtcagttacaaaaaaaaaaaagaaaatagttgccaatccctgtaatataggcattttcatgctgtcttgttagcatttgcctgctgtggtcaatcaatttgaaaaatgtctccagttcttcactcctccctatatctgtctcattttcaatgtgactgcaactcccctcacctgggcacggagccagtttcaccagccattgcatctgtgttggcctgagagttattttgacctagaatgccaagaaagtgacactgtatccaccctgagctgagacttcaagaggcttttcagactttcacttgctctgttagcatcctgactctatgaataagcttaggctagctttctggatgatgggagacacacagcccaggttgccccattgccttagccaacagtcagacagtcttccaaagcagaattgccttctaaactgcaactgaccacaggtgcatgaatgagcctgatcaagaccaaaagaagggcccagctgagcacagcacaaattgtcaacctgccgatgcatggactatatacatgtttgatgttttaacccaccacattcgagagtggtttgttgtacagtaaaagctaactgattcacctgtcattaggaattaagccaactaattttgtggtaggatttccttttttcctttctttattcaaagccagaatatctcagtcttgtccataaacctcaatctgaaaacagagagaacaatgcaaagaaagaaaaactttatgatgattctatgacactttcaccaaacactaagaaaacaaacataaaatgaacaacttggttttcaaacagaaataataaatctgtaagggcccacatataaatatatactgacagcatttgaaggtaaagaaaaaaatatatacgtatataaaaaattaagcaagaataaaaccaatggttgaagaaattgtaataaaaaattaccatgtgccaggcactggtcatgccagaggtatgacaatgaatgagaagcatgaagtccctaatctcccctaaagcacattcttgtggagaaggacagactacaaagaagtgaacacataaacaagatataatatagcacaaacatttaggaaaacaaaaatgcagtaatgtgataaatcttagtaggctattatatacactttatgtatatatataatacaggcttatatatataatataggcatatatatattctctattattaacttaatttagtgacaaaccattaagcttcacctttccattagatgctttttctgcctaaaggactctacacttagatggctgcatgaagtatctgggtctcagttaaatgtcagttcttcattgaagccttccctgatgagccagtttataatagcctactaagatctatcacattactggattttagcttttctgaatatttttgctatattatagtgtctgtttatttatgtgttcacttctttgtcatctgtccttctccaaaagaatgtgctagggacttcatgcttctcattcattgatgtatccccagaatgaccagtgcctggcacatggtaatttcagttacaatttcttcaaccaatggttcattcttgcttctcatggatacaacatcattttatctgaaaaaaataagtacccccagtccatgactatttttgagcaaatgaggatagtaacagtataagatttttagtggcattttcaatgaaagaattatacaacaatccctgattactctttgtctttatgtgtccataattttactgctaacactaagagagtgtatcttgctgttatcaactctggccacatcttcacaagtacatatagcaggtcactattttgttttacaaacagaagttgattaagttgtccattctgtaggacccacaacaaaccacagcccaatatagcagcagaatgtaaggatttagaaggcctaaaatctacaagctcaggaagacacccaattaacagaaattaaagttcaaatctgactcatccacctactggaaattctgggctgtcaaacaatatccaagcttattttgcaatcagattaaagctctgggccttgtgggggccggagattggaattctattttaaaaagaaacgtgtaaggcactctgcttcccatcaagaagtgtaatgagtaggtttcacctatgatccccagtcccaaatgattgaactggcattagtgccaaaaaaattgaaaatgtcttaacatgcattaatcgcttaatggatgtgttgtctgcctgaaaagggcggggtggtatttaggttgcttaatgactttacattttcccatggcaaaatacttgtgatttgattatgctgtaattaaagagttacataaacaatatctttggaaaggaacaaacgggcttccttgaaagagggattttggtcagctccagctggtatctcaggccccttcatgaggagaaaactctcacccccaggtaaactcctctctctgcctcttagaagttgcccttagttttatgcctgcctgtgtgtgtgttgtgagtgtagatcatgggagatggggagtgggcagagggaggattttttaaaaaataaatgacatctttaatagacaattttaaaacaggttgaaatacaagtaataaagacaagcactttaaatttagaaaaggcttgggatcttgaagccaaaaagcctagtaatgagaaaccccaagggcagagtgggatctgtcttgtaaaaccagtcgatcaaatgtttattactgtataaggaagaacctttgaactcatgtggtttgctctcatgtgtcccagaaactatttcctccaggagcacagattctaagtttcttaaccataggtttctcgcaacttttggcagtcaagagaggtctttagcagggaaggtgggcattccaccttccaaagaaagcacaccagtcaggataatttagaaagaaacccagaggtttggcctcaggtttacattgaatctttatctttgggtattaggagcgcttttcttttcaagtccctactgcaatccctgcttattatacagttacaagaaaggtgggaaccaatgagaataaatgtcaaattatttaactatagttaactttcacagtacattttcttttaatttcctagatttcaatctttttcatgttgtaatctttgctacatttggcaatgagtcattcatcatgttcactgatccaagtttcccaccaataatttacaacctattcttaaataaaaataaacatcaactgcaactttatttttctttagacattttcacctcctcagctttcaaatattagaaactaaatcctatgagcctttcatttactaaatagcttaagccagcaaactgagctgaaatcaacttgcttttccattagacatattggcaatttttctaaagctggaatgagagaagaggtctggggtttggggagtttgccttagaggctgtggtagattgacgccatttctagtcctattcatgacttttctctatcccaaccttttgcaccaagactctgaaactcttctcaccaataattgaagcccatttccctcactgtttgaatctggactgccttgtgacttgtttttgccaatagaatgtggcagaaataatgggaggtcttttctaggcttcaagagacttcatgcttttcctatctgtcatagaagcttccacagctaccacgtgaaccagcccaggccagcctgttggaagttgagaggcacatggagactttagcagcctcagccaagaacaatataaaccagtctagacccctaaacatgtgagggagcccagccaatatcagcatagctgcctcccaacccacagctgaccacagatgcatgagtgagcttgtctaaggccagcagaaccacctgatgcatggaaatgcatgagcaatgaaagatactcattgttctgagtgcctgagttttgaggtagtttgttatacactagtattttacggatacaaatatttaagaaagatattgtttctggatcactgcaacatccacagaggtaagcaagtgaagacaccaacatccatatcatgtttatgaaagtaccatagaggaacattggtcattaatgacaaatatgcaacagatactaatgagatctgagacagctattctaggaataaagtaggaaaaccaacagatatggtactcatcctcagggatcttacagtctattggagatgatagatatttcaaattatttatgttgaagtgaaagggaaagaaaaagacagtggatctcaatcctggcagtacattagaatcatctggggaaaattaaaaatataccaatgatgagtcccatcacaaaccaatgaaatcaaaatctttgtggttgggttctgagtatcagtgtttttggatgctccccagatgattacaatgtgtggtgcagattgacaattactggtctgcagtgcttttccaagagcagtcgtagaccaccagcagcatcaatcaggagcttgttggaaaatgagaatctcagatcccacttctgaattgctgagtcagaatctatagatgaaacatgggagtggcaacctatattctgacaaattatttgtgtgattcttatgcaagctaatgtttgagaagcactggtctttgtttgggggcagccaaaattgacatcaactattgattatttggtacaattgatgcaggtcaggcaagcccccaaattggggcttagcccaggacggttcatggctttgtccagaaaagaattcaaggctgagctgttggtgttaaacaacttttattgaagcagttgggtacagcagcagcagaggagccgttctctcttcggcagctctaccccacagacactgtgcccagagcagcagctcagaggcagttctgcactcatattcatatgcacttttgatgatatgcaagttaaagggcagtttatgcagaaattcctaggatgaaggtgctaacttccaggttgtcaggtcattgccatggaaggaaaggggtggtaactcctggtgttgccatggcaacagtaaactggcatggaacacttgaggagtgtgccatgtcttttgaagaggtgcttacccccctcacctgttttagccagtcctcaatttggtactctatctgagtcccacctccagtgttgtgcctcctacctcacaatcaccaacacactcacacacacaagtactcctaagaataaagtaaattgtcagcattgttttcctaggcacaaaggtgaggcatatgtgtattgagtgttcagtaattaatatgagtgagttatacaacaaactcatatgatacttattttaaccttgctcatgatttgagtgttctgttagccactctgtttaaattctctagaaattgttctccacaaataccagaatttacaactttattttaagacaggagtctaatggtgccatgtctaccagcatttcctctcttctatagtttccatctcaatttgtaatataatattttaagagttgtcctcatttctggatgggcttagaggctaatccagatttagttacctttgaaagggtcactctccatcaaattaaggagatcatattccagattttcctgggacagtcctagtttatgcctgttccctgggcataattattaatagcatctcctttcactctctgaaatgtcccagtttagacaatatattattgattaccttacctaatattaataactgcattatcttttggaagaagtaatttttgcctttttaaataaaactataaattgctattagatgtaaacatttcttggggggcagggccaagatggcctactaaaaacagcggtgttcgttggctccatcggaaaaaaaacataataagcatgtgaatccttcaccagcaacaaaggcatacaggttctctcatcagaactgactaggaggctggcgtgacccacaggatgaagcaacaacagtgtggtacagtggccaacctgagagctacatgggggacggggaacctcctccccccagccaagggaagtggtgagagagcgtgctacccagctgaggaaactgtgctttttccacagaactctgcaactcacggatcagaagatctcactcgcgaatccatgccactggggactagcgtcccaactccagaatgcacagactcttaacagccgctcagctggaatctgcttaagcctatggaactcccacagggagagacaaccagcaccgcacttcggctgcctgctgtctaagcactttgagctccttgggggaggggcagcagccagcactaggactggcaaccgccaaacacgctaagctccctaggtgggggaagggcggcacccatctctatagccccaggctgtgcttttcccctgctggagccagagaggctggattccttggtcctaagacttgtcccccacagcccaacactgcagctgtggcagtctgtggccagagtgcctcttcaggcttaaccctgacccatccttcctcattgggcagggcttccctgcaggaactccaataactccagccagagaggttcagggacagaatctggatctccctgggcccgagcccttagggggaggggtggccacagtctctatggagcagcagacttagcctctcatcctggtagttctgagaaatccaggcagcacagataagtgtgtttctccccagtgaatcataccctctccactaaaggacaaagttcttcattaaacaggtcctgttccctgtgctacccaactgggtgagacccaccaatcggagttgtcagacaccctatacaggagcaatcctgctggcatcaggttggtgcccctctaggtcaaagatgccagaagaaggagcaggcacccatcattgctgttttccagcctccttgagtgacatctctaggcacaggagcaaatcagattaatagggcctgaactgaacccccagtaaactacagcagccctacagaagagggaactgaccactggggggaaaaaaaaaaacagaaagcaacaacaggagcatcaaccacaacaacaacaacaaaaagcccccacaaaaaccccattcacgggtcagcagcctcaaagactgaaactagacaaactcatgaagatgagaaagaatcaacaaaagaatgctgaaaacccagaaggccagagtgcctcttctcttgtaaatgatcacaacatttctccaccaagggcacagaacaggatggaggatgagatggatgcattgacaaaagtaggcttcagaagatgggtaataaaaaactacacagagctaaaggaacatatcctaaccccatgcaaataaactaagaacattgattaaaaagttcaaggaattgctaactagaataaccagtttagagagcaacataaaccagctgacagagctgaaaaacacagcacgagaactttgtgaagcatacacaagtatcaatagctgaatcgaccaagaggaagaaaggatatcagagtttgaagaccactttgctgaaataaggcatgcagacaaaactagagaaaaaaaagaatgaaaaggaatgaacaaagcctccaagaaatacaggactccataaaaagactgaacctacaactgattggagtaccagaggagacagggagaatggaaacaagctggaaaacacagttcaggatattatccaagagaacatccccaaactagcaagaaaggccaagatgccaattcaggaaatacagagaacaccattaagatattccatgagaagatcagaccggaatgcataatcatcagattctccaaggtcaaaatgaagaacaaacagttaaagccagccagagagtaaggccaggtcacctactaagggaagcccatcagactaacagcagatatctcaggagaaactgtacaagccagaagagattgggggccaatattaacattcttaaaaaaaaaattttcaacctagaattttatatacagccaaactaagcttcataagtgaaggagaaataaaatcctttcagacaagcaaatgctgagtgattttgttaccatcaggcctgccttacaagagctcctgaaaaaaacactaaatatggaaaggaaaagttggtaccagtcactgcaaaacacaccaaaatataaagaccaatgacactatgaagaaactgcatcaactagtgtgcagaatgatgagatagcatcatgatgacaggatcaaattcacacataataataataaccttaaatgtaaatgggctaaatgcccaaagtaaaagacatagactggcaaattggataaagattcaagacccatcagtgtgctatatccaggagaaccatctcatgtgcaaagacacacacattggctcaaaataaagggttggaggaaaatttaccaagaaaatggaaagcaaaaaaaaaaaaaaaaaaaagcaggggttgcaatcctaatctcaaataaaacagactttaaaccaacaaagatcaaaatagacgaaaaagggtattacataatggtaaagggaaaaattcaacaacaagagctcactatcctaagtatatatgcacccaatacaggagcacccagattcataaaacaagttcttaaaactaagaagagacttagactctcatacaataatggtgggagactttaacaccccactgtcaatattagacagatgaaggagacagaaaattaacaaggatattcagggcttgaactcagctctggatcaagtggatccagtagacgcctacagaactctctacccaaaatcaacagaatatacatttttctcaatgccacatggcacttattctaaagtggaacacataattggaagtaaaacactcctcagcaaatgcaaaagaatggaaatcataacagtctgtcagaccacagtgcaatcaaattagaactcaggattaagaaactcactcaaaaccacacaattacatggaaattgaacaacctgctcctgaatgaatctggggtaaataatgaaattaaggcagaaatcaagagttcttagaaaccagttagaacaaacagacaatgtaccagaatctctgggaaacaactaaagcagtgttaagaggaaaatttatagcactacttgctcacacctgaaagctagattgatctcaaattgacaccctagcatcacaaaacagctagagaagcaagagtaaactaatccaaaagctagcaaaagacaagaagtaattaagattaaagcaaaattgaaggagatagagacatgaaaaacccaccaaaaaatcaatgaatccaggagctgattttttgaaaaattaacaaaataggtaggccactatctagactaataaggaataagagagagaagaatcaaatagacacaataaaaaatgataaaggggatattactactgaccacatagaaataaaaactacctttagagaatcctataaacacctctacgcaaataaactagaaaatatagaatctatggataaattcctggacacatacaccctcccaggactaaaccaggaagaagtcaaatccctgaaaagacaaaatacaaattctgaaattaaagcagtaattaataacctaccaaccaataaaagcccaggaccagacagattcacagctgaattccaccagttacaaaaaggagctggtaccattccttctaaaactattccaaacaattggaaaaaagggactcctccctaactcattttatgtagccaccatcatcctgatatcaaagcctggcagaaacacaacaaaaaaagaaaacttcaggtcaatatccctgatgaacatcgaagtaaaaatcagaaaatactggcaaaccaaatctagcagcacatcaaaaaatttatccaccacaatcaagtaggcttcatccctgggatgaaggctggttcaacatacacaaatcagtaaacataatccatcacatgaacagaaccaaagacagaaaccacatgattatcccaatagatgcagaaaaaggcctttgatataattcaacatcccttcatgttaaaaactctcaataaactagatattgatggaacatatctcaaaataataagagctatttgtaacaaacccacagccactatcatattgaatgggcaaaagctggaagcattccctttgaaaaccggtataagacaaggatgccctctgtcaccactcctatccaacatagtattggaagttctggccagggctcagctgggactgtctgctgaagtatccacacatggcttcttcacttggcatggcttcttatagcatgcaagatggatccatgagagagtattctaagaagcatccaaagagaaagcattccaagaaaactggaaggaagctgcagggccttttaccatctatcctcagaaatcatattagcataactcccattgcttgattggttgaggcagtaataaacccatccagatttagaaagagggggcatagataagccgtcttgtggggagaaatgtcaaggaagttgggggccacatttgataagcactacttctactgatgccacaatcatgacgaggtgttttcctgcctcccttgctcgacactctcttcctctttcctttttctagttcctgatgtccttgtagtgtcctttaattatataattctctgtaaaaaatttcccccatgatccaatatccatgcaccctatcttctacctcttcccacggaaattctgttctctccacttggattatccctgctagggtctagtgtcaattactttactgaaatatcgcctaaattttgaatggctgagcaatttaatgcatccatgagggtctcttcatattagatggagaatgtgctaatccaaatgaacaataattagtagtaggtgtagaaatctttgttaagctcagaagccttcctttacattgtcctgttttccatgtatttctcatctcttccctagaccctacactaccccaaactaaaggatgggctaagagcactgtgtcattccatttcagagagagatgctacccctcactgtggctttccctgcaccaccctagtccagttgttataactgcgtttccatacttcatagtatgtaagatgagtttaactataaagctgtctgtttatgtaccacttaggaaaaactgctgctaattaacgtataatgcaagattttttataaaggggcacaggaaacttttgagtatgatgggcctggcctaaattttgagtgtgatggtggttacaagggtgtattcatttgtcaaaacatatgacctagtgccatttgactatgtggtttattgtatgtcattatagctgaactaacttgaaaaaaaagtaccatggaatactgtaatattgatacacttaaataatgttttcttaactgcaaggagcatgcttggaaaggaatcatgttcaatatattgtgtgagatgaaactaagctttcatcctcagatgaaaagcatctcttaaaatgctttaattttaaagccatctgtcactctaaagacacccttggctaacaggctcgctgacaaccattctcttccactttggaggaacactgaagtgggccaataaaacctgggttttccaaggtgatagttgtggatgaacgtgagctaactacctcctgttatctcctctagcagttctgactgaggtttgttcatattctactgatgcttatttcccctccttgccccatctgagcagtttctctgttgacaactgctcagtggatcaggcggagtgagggtataactacttgtcaaggtgtcagacacttccatcaagattcaaactcctgaccataagtaacaaaggggcttacaatttcaaaaaacaacaatattaaataaaacacgaaatagatacagctaccactcccgaccaactatatatgatgcttagcatccccaaactaatgctcacttataaatacagcaagtgtcccaaacacttaaagaccagccacactcttttataaaaaagacttttatgttttaaatatttgtttacagtttatttttgagttaaaatatacatacagtaaagattcaaaaacataagtgtacaatttattcagttatgacaaatgataacatccatattaaccatactccagtagatatatggccattttctatggtataatttttaaattatattttaaatgattgttgctggtatataaaagtgcagttggcttttgatattgatttggtaaccaacaataatgccaaactctcttatttattctaaaactggcccttaaacttttaaattttctaggtaggcatttataatatactatctttagataatgacactttaaaaaaattccaagtcctcattttttaatctacttctctgatataattacaacatcaaagacatataatacagtgagaaacagatgtagtgataatgagcctctttttttcagaaattgatctttaaaattttcaccattaagcataatgtttgccataatttttaaagatattgtttatctggttaagtaaatcattgtttttcctattattgctaaagatatctgtatatgtatatttacatatatatatttagccacaagtgaatgctaattttatccaaacactctttttcatatctatttagataatcatataggttttttcttttaatatgttaataaagtagataatataatcttactttctaatgttaaactaattgtattcctgggataaaaccaacttaaccaaaaattatttacttttttttttttttttgagacagagtctcactctgttgcccaggctagagtgcaatggcataaccttggctcactgcaatatccgcctcccagggttaagcaattctcctcccaaggagctgtgattacagacatgcgccaccacacccggctagtttttgtatttttagtagagatggggtttcaccatgttggccaggctggtctcaaactcctgacctcaagtgatctgcctacctcaatctcccaaagtgttgagattacaggcgtaagccaccacgcttagcctaaaaaaagtttacttttaatgtattatagaatttgatttgacagatactatttaatatttttatatctgtgtttataagtgacactagacagtaagtttaatactctccttgtctgattttgatattgacatttccctaatctcaaaaaatcagctgtgagatgtttcctctttttctgtattctgagagtttttgtaagattggagttagccatttataaaatttttggtaaaacttgttatttagtatttgataaaataaggatagattactttttaaataacagttttagattaacagaaaacttgaaaagatagtcagaattgcaatgggctttgcatcatttcccttattattaacaggttatattaatatggcatatttgtcacaactaatgaacctatattgacccatattattaatttaggttgttaatttattcagatttcctcagatcttacctaatgtctgttttctgttccagcatctgatctgggaaaccacactgcatttagttatcatgacttatttggctgtgacaaattcccagactgtccttccttgacagttttggagagtacagttcaggtaattttgtagactatctcctattggcatttgtgtggtgttttcctcatgattagactggggttattagttttttaggagaaagagcttaaggagaaaatgttgcatcatatgaaggttacacagtatcaacatgatttattcattgttgatgttgaccttgctaacctggctgaggcagtctttgtcaggcatattcttttcttcttttaaaagtagaagagtcttttgcaaagtgtggaccatgagtcagaacattcacgtcatctgggagtttgttaggaatgcaaaatctcaaacttcatcacagataactgaaacagaatatgcaggtttaccagatcctatgtgattcatatttttttttttagacggagtcccactttgtcattcaggctggagtgcagtggcacaatgttgactcactgcaacctctgactcctggtttcaagtgattctcctacctcaacctcccaagtagctggaattacaggcatgtgtcactacccccagctaatttttgtatatttagtagagacagggtttcaccatgttggccaggctggtctcaaattcctgacctcaagccattcacctgccttggcctcccaaagtggtgggattacaggagtgagccactgtgctcagtctcatattctttttaacatttgaaagaactgctttaagataatctagagcagattttatcaaactttttttatagagagcccaataacaaacattttcagctttgtgagctataggttctttgtcacaacttttcgattcagcccttttaggagaaagtatccaaagacaatgcataaatggcatagagtttaagtccttacttaacttcgtcaataaattcttggaaactatgtgtattagcctgttctcatgctgttaataaagacatacctgagagtgggtaatttataaagggaagaggtttaattgactcacagttccacacgtctggggagacaacgaatcatggcagaaggcgaacgaggtgcaaaggcatgtcttacatggtggcaggcaagagaacatgtgcagggtaactgccctttataaaaccatcagatctcacgagacttattcactatcatgagaacaggatgggggaaacagccccatggttcaattctctctacctggtccctcccatgacaggtggggattatgggaaccacaattcaagatgagatttgggtggggacacaaagtctaaccatatcactatgactttaagtgaaacaacatacggcaggtcctcaaataacatttcttttttcaaagcctaatgataaggaaaaaacatgttttttttataagtggttttgcttaaagttacattttcaaagaacctattggtgacttactgtattttttttggaaaaacttatagacactaaaatttgaatttgaaattggaaataaaatgaaaacttgaaatgtgttgtgaaatattcttattacctcttaaaaatttaaaaaacatttcaaataaaaattttaaaacctttaaaaattattttaaagcatttatttcaaacatttaaaaaattaaaaacaatttctgttttgcagaggctttgggctctgccaaaataggcatccagttggagttggcccatgggcttagctaggccatcactgatacagtggcttttctttggatcctgccagctgctagctctacctgattagtagcttttaaagatgattttcatgaaaaggtaacactgtgactctcattcagaaatataaagtgaacatgtatcagatattttatttaatccattaattaaatgagaaaactgaaaaagatgttaaaactggctcaaagaaaaaaaaatccaaaaacagatatatttctaaatcaggaatattgaaaacttaaaatggacacaaagtcacctttttcagaggaagatttgcctctctaccctgcctcagacagaattatttgcatgcttatggtcaagagtaatttgcattgcttgttctctacatgctaactttgatctctactgagttgtacaatggcctagtcaaagatatggagggtattccatgggactagataatcccaggaggctgtagcattttattaaaagaatatccagtaatctcttttgcttatttcaaagtgttaagtttttctttgtagttgattgggatattttcctctccccactcccttaagaaaaaaatagatgaggaaattgatggctcaccttactaaatgactcacctaacttcatgccagagctactcataggcaacctcaatgcaaagaaggctctcctttgggtctttctaattgggaggattcatctgacagattagactctttaaatagagacaatgatgggccatttcaaagacaccaaaatgttttctacagcttcaagcactcatttatcacttatttacttactaataggaacaaattacattgttgtgtttttttttttttcctttggcacaacatggggaccaggaaccttgttctcagtgtggctgtgccatggaaccctctgcaaggaactttttgaatggcaatttcctcctgccagacatgaggaattgaagcaatttttgaaataaagcaatctatgggccttctaaaattatatctccccactatgatccataaaactggacccttatgttttggaaggagtcttagaaatcaactagttgactatgtttgcaccatgtcttcattatgcttagttgtgactactcttatccttcctctagttcttcctatgcagttccacttgaagtgcttatgaggtgataggttaaaaagtctggatgtctttgacttctccagtctctggagtaagagtccacccatccaaatactaacttacagttgaaaataaactttggtctactctagctgatcacatttaaatgattaattttgttaaattttcatattgataatctctacttttcacaataatagaagtgcattgatgatgtaattagtatattattttatttcaatctatcaatatctctatcaattcagctgctttaacaaaggaacctctttctttgagtaataacatcaattaccgacctaaaaacagaatttggagctaataatgggaagtataggaagaattccaagtttactcttgttctctttctctccttgactccacatacacattactttttcaggcatcaatattacctcaaaccaaggcttttcaaaccttagcatgtaaaaaattagctggaagacttgttaaaacacaaattgcgggaccctcaaatggcatttctgattgagtagatattcactacagttgagattctgcatttccaccaagctcccaggtgaccgaaatgtttctggctgaggaccatactttcagtagcaaaaaacaacttagtgggaaagagaaagtcaaacatatgctaaggcataaagattaaaataataaatgacaagacccgaaagggtttacaatctgttgggaaaggtaaatatgaaataaatgaaaacaacaaattgacagagatgatgcagtatttttgttttctgttgttgctgtaacaaattacctataaaagtgggcttaaaacaacatcctttattatcccacagttctctagatcaggggtccaagtgggctgggcagggtgatctgcagaaggcctcacaaggctgccatccagatgtcaacttagctgtgttctcatctggagcttaaacttttttcccaagcttattcaggttgttgggagaattcatttccttgggattataagactaaggtgcttatcatcttcctggatagtagctggggtaatctcagctcctacaatccactctcagattcttcttatgtggctcctccatcttcagaatttcctgtgtgtttagttcttctcatgctacccatctctgacttcctctgtttctgatcctagacccagacttaaaaaactcatgacatacatcaggcccacctgggtaatctctctttcttaaagttaactgtgctattacctaatcactggagtaaaacccattatatttacagtcttggaaaaagttgtgcatgatgagtacaccaggaggctgggatcttggaagtcatcttagaattctgcccatcacatagaggtttgggcaaagtgctattggaacaatgagggtgatgtatcaagtctatcccagggagttacggaagactggctgaaggggatagtgcttgctggggtcttagaaaatgtaggtttttggcagcttaagcatggctctctgaaaaaatagtaaaagggaattccaaggagaggaaactgtgtccagatgtatggatcttttaaggcatgttcaataacatggagaagttttcagagacaagagcatagaatgtaaaggagagatatcagcatgaaatatgtgccttatgatccaaagagcaagcagagtaaagaacaatcagattcaaagctagctggttactagagcaagtccctaacctctcttatactcagcttcttcctctattaaatgcatatcttggcctaggccagtgtttggtaaacagtgacctaagaagccctagagttttggaagagagggggttgatatacacacgagagggtggtgcaagggtctgggaagctgtgtgtcagtctttgaggccctcactctcagtttcaccaaagtcccactcagcttctatctgccttatatggtttggctccagataagattttacttagagtttatatgtttaaatgttctaaaaccacagataaactctttgcataacatgattttttttctattacactcagctcttgtatttcattaattaattcattcgttcagcttttttttttttttttaaattgcgcctactatgtgctgggcagtgttctaggcaggagatttattgggaagatttatggttctttttgtcctggagcttgtcatcttatggaggatataaacattagtcaaataatcataactaaatgtcaaattgcaactgcactaagtgtgacaagctggtgattcttgatgctattataactgaaatagtttatcttataatgtagaagcaagaaggccttcctgagaaactgacgatgagtttgagaattagaggatgagtagaagttaactgaatgactacaaggaggaattgtgtttgatgtaaggtggatgtatatgcagtgtcctttggcagatgagagcacagcgatgtgaaggacagagggaaggtccatgtggctgaaataaagaaaatgtaggggaggccagagctgatgctggagaggaggaaggccaagatcatggaaggctttgtttttaatgttaaggcatttgcatttgtcttttatttttagagacagggtttctctctgtcacccaggctggagtgctcttacacgatcatagctcactaacccaaactcttgggctcaaatgattctcctgcctcagtctcctgagtatctagagacaagaggcaggatccaccatgcctagctatttaaaaaagaaaaatgtttttgtggaaacagagtctcactatgttgccgaggctggtcttgaactcctggcctcaaggaattctcctaccttggccacccaaagcactgtgaccacaggtgtgagccatcacactcagccatatttgtttttattataacagaaatagacttgtctttatcctaagagacttggggtttcaaaagaatatggtctgaaaagagaaaatgggtaggaaagaggtaaggggtattgattcaagtagactgatgaggaggattgaatgcaggaaagatgattacacaggaactcaagtaggtggtggtagagaatatgaagaaaatcagtacatttagcaggtgtcaagaggtaaaatcaaacgggtttggtgaaggactggatgtgagagatgatggagaggagacagaggtttcaaaggtaactctaagatttctggattgcaaaaccagagcaaaagccctgacattaatggagacaaggtgctggaagaggtccaggttgacggagaagattttgatttatttagtcatgttgcattttaagttcctttaacatccttagttttaactaagtcaattcaatctgtaggactagagcttgaaagagagatcaattaaactccctgggttttcacatcttcatcttcttgtagcaataataaaatatcacttaaagaccattgtaaaaatagataacaagtacaaatggaaagcatgatgcaatggaattcatgccagtagttactataacacaaaaataacatcaagcttttcactagtggctgttgggcagttcgagggactcaacattgccagtattttaatgggtgtaaaattgtccatatgatacaattttgggcaagagagtttttgacagaaaacttttggaagcaatacattgacctcaaatgactacaagtaaaggattttagccagagttacaaaatgatggggtaagattttcttcatgcaggactctttcagaccacatcttccggtactcaacttttactgctcattactgggaggaacttctaagaattccagcacctaggccagttaaatcagaatgccaatacctaggccagttaaatcagaatctctagggattagggaccagcattgatttttttatttctttgtttgtttgtttgtttgtttttgagacgtagtctcgctctgtcaaccaggctggagtgcagtggcgcgatcttggctcactgcaacctctgcctctggggttcaagcgagtctcctactcagcctcctgagtaggcacctgtcaccacacccggctaatttttgtattttattagagagggtgtttcaccatgttggccaggctgatcttgaactcctgacctcaagtgatccacccacctcggcctcccaaaatgctgagattacaagcatgagccactgtacccagccagcattgatagtttttaagcctccagatagttctggtgtgcactcatgattgaaaaccaccaagctagagtgagagtctttgtgtgaggtgaacttgggtaataagccacccagagaaacatttagaattttctcccacggtccaggaggattgaagtagaactagtggctttggatttttcctctatttccccatattgcctactcatcaggcatagctcctttgttcatactgcctgaggctgtccctgatgtcttccatcagacactgtctgattctcctcactacctagatgtctcacttgaagactgtgagtcaaaaagttgaggttggagacctcacctgaaaatctgtgttttgagcaagttctatctgtattcttaagacaaagaaggtgggtttgagaagcagtgtcctaaccattgttactcaaatggtaagtgcttggactggtatcacctagaagattgtaagaaacacagcatctcacacattccagacccatgaaacaaaatgcactttaaccacatgtcctggtgatacatatgttcgttaaagtttgagaagcactgccctaaaactaagtttcccaagagagatgccagaccacctacatcataacaacttgagatgctaataatctactctgaaccttatgaatcagaatatcttgggtgaggcctggaaatcttcacatttaacaaaatcagctattggctcttacgcacaattattgtttaaaagtactcggtcttgtattggtttagtgaacacatgctcaggcagctctggggatctggtccaacatcacagggtaaaacaatgtgagttgggttattggtctcacgtactcaaacatgggctacagttgccaccccacccaccacacattggtcttcatgtatcagtccttcaagccttactcatgggtcaacatgttaattgtgtgtaactcatagagtgtgatcacaaagggagatttatttttctctctcactgtccctttaaaccagtttggtgggaagccaaagtggctacctcctctgctttcagacaaaaatctaggcagtcatcatggttttatagttacctttaaattaatagaaagtcatatatgagccagatgtagtgggtgcatggctgtcatcctagccatgtgggagaatcacttgagcccaggattcatgaccaacctgggcagcatagtgagaccccgtctcttaaaaacaatgataacaggaaagtcatatatcatttcaagccatttagtcacaattaaacacttaaaatatctacctctagataataatcaactctgaaccagatttaacattagcatgcgttttctccctagctggggctggctacaggctggctccctgcttttggagagaagctatgattacgtttctctttttcccttttctctccaccactcaatagctatattaataacatctccttgaataagtgaaggaggcaggagggaaggaaaggagagcagaaaatccttatcagacactaccatgaaatagtttcacattctctggttttggtggaggttgaaatcacacttttatggacgctttcaaaggtttattttggttctcatgctgggctgtgctaacccacctcctgtgatgtggatgatgtgttctgttcctctaactctgactctgccctcagccactagttttctggttactcattcaacacacacaactggattaccaacagcctactcaatggtcattttggacaagaatcaaggtggctttaggttcctacttttccatttgacctacatacggatcataggacaccaatgcatcttttgtcccactgttgttggaactgtggttacttcctaaatttgatcctcaactctcacttcttcttgtcctgccctctagagctgaaagttgtaggctttttaccttaggatactcaggtggagatcagacccgagtcactgtgatcttcttgccatgaggacaacactttccaagttcttcaagtggtcccagtaaagccactctcagtaaacttgaggggcagagaaaatgtttcctcacctttctagaataggacctggatctcatagcacaactcatcataaagaaatcttctctctagtattcaatcactgaccctttatccttttgtgacaaattcaaaagttatcaaaatggttcccaatcatttccttttgctcatggttcagcatctgattggaatctgatgtctatcatgtcttggtgcttcagttgaaagctccaatttaacatcttgataactctgaagcacgcacatgctcctttacgtcaaatcaagtttaaagcaatgagttttaagattggtggtaaattcagccaatcaatcaacaaatatatatatggaaatattgtgccattttatatcaggaacttgagtgttcatggatttttgcgtccaagaagtgttctagaaccagtctcctacacataccgagggacaattttataaagcaaaatagttaaaattataaacaaaactgattacattggaacacagttaccccaaaacatgaaaaataacaagtttgagataaagccatttggatggttagttttatgtatccaattgactgggctatgggatgcacagatagctggtgaaacattatttaggggtatttttatgaggaagtttccagaagaaattagcattttgatgggtagacagagtcaaaaagattcgttctctctaatgtgggcttcattcaatcctttgagggcccccctccccccccacaaaaaaaaggaatggaaaggtgaatttgccctctctgttcgagctgggacattcatcttctcctgcccttagacatcagcactcctggttcttgggcctttggacttggatcaggacttacactgttagcctcttgcttctcaggcttttaggattggacaaaaacaccaccactgactttcctgggcctccaggttgtaggaggaagatcacgggacttctcagcctccattatccatgagccaatccctcataataaatatatttctatatatctgattttatctagtatataattgtatctaataatatataaataacatacaataggccaggcatgatagctcacacctgtaatcccagcattttgggaggctgatcaggagtttaagaccagcctgaccaacatggtaaaaccctgcctctattaaaaataaaaaaatacgccgggtgcagtggctcacatctgtaatcccagcactttgggaggccgaggtgggcagatcacgaggtcaggagatcgagaccatcctggctaacatggtgaaaccccatctctactaaaaatacaaaaaattagccgggtgtggtggcgggccctgtagtcccagctactcgggaggctgaggtgggagaaaggcatgaagccgggaggtggagcttgcagtgagctgagatcgtgccactgcactccagccagggtgacagagcgagactccgtctcaaaaaaaaaaaccaatacaaaaaatacaaaaaatagctgagcatagtggtgcctgcctgtagtcttaactactcaggaggctgacacaagagaatcacttgaacccagaaggtggaggttacagtgagccaagatcctgccactgcattccagcctgggtgacacagcacgactttgtcacacacacacacacacacacacacacacacacacaaaatatatatatataaatatatatatatataaaatatgaggttaataataaatatatatattttatctaatgattttatatgtcaattatatattaggtgtgtttaattttatatatttaaacagaactaatttatatagtattagtatagtatattagtattcaatatatactattctatattactaatatatagaatatatactaatattctatattagtatactatattagtatattagtatatatagtattagtatagtatattagtatttaatatatactatattagtatattatatactattactatagtacagtatattagtatttggatttctatatataaatacaaataaatactaatttataaattaaaattttaaatatgtatacataaaccctggccaatagagtcatacatgtgcttttttatcaatacctacaataatagaatcaaggctagatctaattcattcataatttcaaagtagtgatgagtataaagaatacttggagagatttggaacaggaaatacgacaataaaatacctgtgatttctatttctaatacctgtgattctattttgcagttatgtatagtacaaaccctgctgtctttttttttttttttgtagccccatctcaaaccaaaagaaatggtgagttttagttagaaactggtgaaagtaaaaatgtagtttttttcttacctacacacagggtgaatcattttttgaatcattttctatttatgttctgtgatttgtttattgctgaactctactcctgttcgagaacattcttcaaattatatgctttggaattgttgagatttgtttcatgccttagcatattgtaaatttgtgtaaatattccatttatgctagaaaataagtattctacagtaattgagtacagcattctgcatttatgaggacaagtttgttaattcttttgggtcaatctttcagattattactgatatctttgctgcttctttgatgaattactgaaaaagaaatatcttattattggtttggaattgttttatcttcttgatgaattgaatatttttgctatttggatagattctcttgatttctaaaaatgctgtgtgttcttaaagtacattttacaaaacatgaatagagctacaccaacaaatattttcttaatgattatatgcatggtatactctttacatctttggttttcatttgtgtgtgtgcatgtgggtgcgttctcatatattagaaatctctcccaaaaacagtagattattgttttctaattattctttaaaaatccagactgcccattctttttgaagcagagaacatatctacattgtgcctggattcttgacacattaaatatgagataaaataatatatatcatttcaggcaactaactttgtggaaatatagttatactatgatgaataactgatgcacactgtttcttttcttaattttttcagtagttaccctaaaaattaaggcatgtatatttaactaaacaaatttaatttttattaacacctttaccctcattcagaaaatataagggaattagagcactttggatactcttaaaacttacatgttattattactgttaactttacttacatataaatatatattaactcctctatcattattgttttcaagagtcaatattcatttagatttattggcatatttaacatttcctttactttcattttcttctctctgggatcactttcattcttcctacaaggtgttatgtattgaaatgtcttaaaaagatctgctcaaaagaaactctcttaggttgtctaaaatgttttcatatttctttatttcttgatgggtactttggttaaatactgaattctaggttgccagccattttcttgtcttctggctacatagacgtattgaagaatcattggaaagcctgttttacctttaaagtaatctactccctccctccctctattttattccattattttacttttgtttctgggttgctgttgtttgtttgttttgttttatgaaatatataagaggggatgattcttattatcttgcctgtaatttgttaaatttcttgaatggattgatattttaaattttcaaccactatctctttaaaaaatctctataacccattctctcattcctttagttctaaaatttcaattaaatattatttagattttcttacatacattctttatctcttaatcttttttatttataaaacttttttcactccctatttcatttttgaattgtgtgtgtgtgtgtgttgatgtaactttcgttttgctaattctctgttgatctatgttttagcatctgttaaactcattcactgtgttcttaaatttggtcattatacttttcttttttagaatttttatttcttaaaaagtcaaatgtaattttttaaagtttatcgttttcaattcattcaaattaggttgaagaattttagagttaactttgaaatacacaaaaattactgagttttcaacatttttaaggattatataagcaaaaatattttaaaattaaagatattttaagattatttgtatgtaagataaaatggatattatatttggctgtttagttaattttgcacttactaggtaactggatgactccctacttttcttgttcttttaatcaatcaaaaataacatatcactaataaataatttttaaaatccagtttgcatttaatttacccattaaattttttcaagattaacatctttttagagaaggaaattaattggtttatgaatcataatgacagaataattgtttattttgtgctgagtatgtaagagttagagaccttgaggtgaagaaaatatgaaagagaacaaggaaattaagatggttggatcaccagattacttcctccatggatgggaatgacattggagagctggaatttgtttcagtcacggaactgataacataattgctaggttttagatactggaatgacacacaattatattatagcccaaacacatccttgataattttaatgtttaaaagactcagctttatctgtgaaatattttaattaaatactttgcttttaacctctatctaaatttctttgttgaaaaactgaacaattatctgtactaccttacttacatcacaacgttgttttctatttaaattacctctatttattaaaaatatgtacctaagagtacataggtgatggagttcagaatacactaccccaaacaatggtatgttggtatctgagaaaatggcagaagcaggaaagtcactctcacagtcccttcatcagttcccctaaaccaagtcataaaaccctcatttgagaggggccctccctatgcccagaggaaaaaagcattcttagctctgaagacacagggaagagaagagtaagaacaaacaagccttgctaagttttccctcgtttattaccattattattctctttccctccaatcatatttctccataactatccactcttcatcaaacctaggcataaaaatacacatatttgtctatttctttgtgtcttcatttcctcacaaagacctcagtgttatgtaaaccttatattaaatacatcgatttgcttttctcttcttaattaatgtcttttgttaatgaagcctcagccatgaacctcaggaagaaaatatgtttattttcgtttccacttcatagacttttaacacttgacatttttctcaggtccaaaaagaatcccaatctaacatactttcaaaattattatgacagatttaagggtctttcttcaattttataaattatttaagtacacattttatcattcttctatagaatgttatattttaacttagttataacttaattatattttaactatttttgttatatcaaactactttcatataactaacctgcaaatatttttacctcttccttctctgtgttagttagctattcacagactgacaaatcactttaacccaatgactgctatagtttgaatgcatctttcaaggttcatgtgttggaaagttaatccccaatgcaatagtattaagaagtgagacttttaagaggtgattagagggctccagcctcataaaagcattaatgtcattactgtggaagtgagttcattattgtgggagtggttatcaaaggacaagttcaggccctcctctcaccctctttcactttctctttgcccttccaagaatgtcctcaccaggtgctggcccctcaatcttgtatttcccatcattcagaattgtaagccaaaaaattctgttcattataaagtacatagtctgtgatattctgctatagcagcacaaaatgaactaagatcgtgacttaaaacaataagcatggtaagcaggggaatgctaacttacgtaactttcaaaatgagtgaggactgtaacaccaaatgcaaaaggagctgtgcacaaacgctgtacctcagtggataaagttgtttcccacagagtataggctaacaattctgaagccactatgaatgtacactgtaactgatcaattaagtaaatggatgaccgatggtgagagccaagtttctcattgttggagtgagagagaaaacagaagaaagtggaatgggctacatgtgttaatggattggaattagagactgcagcatgaattcatcttcaaacgaatgtggatatagatcattagatggaaaatattaatacacatgcatatagacacacaggttagtatgcatacatatattttctgactctgtcagctgggaaggctgagaagcattcgcaccccattggcaatgaacacatctaacatccagatcttggttttcaataccattctccaaaacaaaaaacaaataaaaaacagacaaacaaaaccttgggaaaatggctgattcttggactaaagcagaaaatatataagtctgaagcatcttgaaatgccaaaaaagtgaggaagtacttaaagtgcacacacacacacacacaataatggggtaagtaaatgggatatggaagccaagtgaaagagccccaagtggccaagttagaatgatctgggcaacacaatacataatgtagcattgaattgtaacccaaagtataaaataaatacctatgattccatagtaacataaataaataggattgaacatactaaactgttgtgcagaataattgcaaataatttatgtaaatatcttcaaggagttggaacataactcttccactccttaagtgtgggctgtccatagtgacttctttccaaaagtacaatacggaaagcaggtgaagagtaagtttaccatagagaaacttgacaaaaactacctcaggcagatcattgagattaatatcaatactgatgttatgttgataacatgacatcacttttggtattatgatgaatatgacactttacatttgtggtcttcctccccgaaacctagaactcaagtcaaattataagaaacaggagacaaattccaataagaaacttttcatgaaatacttcagcagtactcttcactgctgtcaaggtcatcaaaaccaagaggagtccaagaaactgtcacagacaaaagaagtctaaagaatatgaagactaaatgcaatgtgttatcctgaatgggatcctagaccagaaataagacattaggtaaaaattaagaatatctgaataaagtatgaacttcagctaataacactgcattattattgtgcattcatttaaacaaatgtaccatgttagtataagatgttaacaatagaagaaattgggtatgagaaatatgggaactctgccctagctttgaaacattgttgtaaatctaaaaatactctgaaataaaagttatttttaaaaacataattcaacaaagacagatttaccagaggtaataaagaagactcagaaacaaaacaacaggcatgagttatggtcatagctctgtctcagccagaagctttttttggtctcactcatacgtctgtggactctgtgaggagaggcagctctgctgattttggctggaatctatcacatttttggcattgcctggctataggctggtctaggatggccttatctgagacagttgggctctggcccacccctcctcttatcttctagcactgctggtctgggcttgttcacatggtgttacatgggttaaaagagagagtggaagtacacacgattccaaaggcctggaatcacaaataaaacattatcacttcctccgcattctgttggacaaggcaagtcaccaaactagactagacacaagtagagtggggtgtgtcaggggttggggggaagcagagtaagtgaaaagagattccatttcctataggaaagagttccaaagtcatattgcaaaggcatgaagcattggagacatttttgcagacaaactaccacacttttttaagatgaaccagaataggtcagattatctttttatgacaattcttgatatgcttttatttctaggccataatttctgccttgcattcatacatgtatcaacaaatatttatgagtgccttaaatgtattaggctctttcacctatcttcttagaacttacaattatatattataatcaaaagtgaaatgctagattcctttattttgggacattatttttgaacacacttggctaggaaataagccacaatttatttatttttttgtcaatgttccttgaaccatactagacattctggtataaattctaactagtctttccttagggataaatatagaagaacttcagttactaaccaactgacatatgtaactgtgggggcagaaaaatttcaacttcctcctcttagggttccagcagagcctaagaattaaattgacatagatagataaaagcatgcaaatttatttaacaagttgtatgtgtcatggggaccctcataaagaaataaagacctccccaaagcaattagagtatattacttatataccagattgaacaaagaatagtaaactgtgaaaatgtggctaaactatgtgggggaccggtaaagaggagttattctaataaggtctgtatagtattctctcagtcccagcttctcattcttgaagacaaacatcttgccttttcttcgggtatagggagagtgtcttatacaggagttaaatcttttgcttttaggaacaacatgaaggccaaagtcatcttttatcaccagctgctatacaaatgtctttaacttaatgagtcaataagccaaaataaggtatttcagcctcttcataacatttgagcaacagtactcaaagtgtggacagactgtggaccagaagcttcagtattacttgggggcttgttagaaaggttagaatatcagaccctaaaccagtcctgctgaatcagaatccctgtgggtggaacccaggaatttgcatgttttctagttctccaggtaaagctgatgagtaaaagtttgtaaaccactggtttatgatccagtttttcaacgctttttcatcattaagaataaaaggaggccagccggatgcagtggctcacacgtgtaatcccagcactttgggaggccgaggagggtggatcacctgaggtcagaagttcaataccagcctggtcaacatggtgaaatgtcatctctactaaatatacagaaattagccaggcgtggtggcaggcgcctgtaatcccagctactcgggaggctgaggcaggagaattgtttgaacccgggaggtgggcgttgcagtgagccaagatcacaccactgcactccagcctgggcaacagagcaagactccatctcaaaaaaaaaaaaaaaaaaaagaagaataaaaggagttgggtatttctgtatcaccattaaatgaagtagtgaccatgatgcaaaaatataactttatacaaaagttatatttttgaattaaaatatttattcttattctactgtattctgaatattaggctttcaatttatttaattctgcattaccccagtccagaacatactattctttgttctggatattaggcaatggcttttgagcagaagaaataaagattaactttgaccttgatataacacaaaagtataaaattcaccatggatatttcttttcatgttattaatgttactctttttagctgatttcttaggttgttttattaattctttgtattgaaagatataataaaatgggatttcattacctcaagctttttcatttttgccctgatattcattctgtctcattgcattcagtcagcctcatttttccctctatcagctctcaactttttggactcagtgttcgtccatcctcacactttccatctttcttttatctttaaacaaacaactcattttaattgcctgtgtcttgattcttttccttttgtttcatggatgtcactttctctctctctctctctctctgtctctgtctctctctctaccaaatctgactgcaaaagccctcagatttcatgcccttgagtttgtgggtgagctgactgttcaggagaatcaagacaatcttattccaggtggtgattcgggaatccagtctgcctgcacctttatctttgccattttatcatccatcatgtaggaaaagagaagagagagccagaatgtctctcagtggactttactgtttgcattgaacaatgtctggggttgtcccgtgatccctgcctccaggcttcacaattcttcccccttgagtgtgggagagccggggacttgcttctaaccattagaacacggcaaaggtgaggaaatgtacattgtttcgtgtcattacatttcataagatgttgaaactgccttgctagaagactctctggcttagaagaggtaagctcccatatcacaagctacatatggagagaattgtacagcaagttgctgagggagcctctagctgacagccagcaagaaactgaggctcacagtctggcagctggcaaggaactgaatgctgccaacaaccatgtgaacttggaggaggatcttgtctgggcttttcaagctagcacgttgattacagccctgtgactctgaagtggaggatccggttaagctatggccagaatcctgaaccccagaaactgtgtgatgatacacgcatattgttttcagctgctatgtttatggtaatttgctgtataacaataaataatccacgcccttagcccggaagtgccatgcatccctattattcacatttcgctgactagaactagacatatggccaattctttgcaagggaagttggtagaacagtatttcttgtacccaggaaagagataactgcatataggtgggcactagcagtatctaccacaaaaaaagattcaataaacttttactgcttttttaacattcatgttctactggtgagatgggaaatgaatacattattagtggagatgactatatagtaataaaaagtggaattacatttgccattgactttaaagttaactatgtttattttttaccagtctttatgcactagaatgtgaagtctatgtaactaagtttgatattgcacttctattatcctttattaattatagaccctcacttaaataggtacctgtgtgaacacatagtaagtattatgatttcattacatgggttactataatctaagaacttgtactatgacaaaacttttcaatctcaggagtatgatagagatgttttatcatgacaattgtaaaagacataaaaatctttattttcaaatgaatatcagatgagaaaagaactatgagtcgttagatcgtcatgatgtctttactttttcatagccttggtggtgggtatcagtctatgacttatcaggcctttctagtttaagagactgccttagggatgggtcaaatgtttagtggatttgaagacagggctgccaatggtaatgaagaatgtgattcaataaatgtttactgcttttttaacattcatgttctactggtgagatgggaaattaatacaaaatcaataataataacagcaaaacttagtaaaccggagctgctcatatagggagaaaagtaaaagaacaatgtcattctttgctaatctagaaataaaatactataattctcttgtgtctgaattttggcagtctggttccttctgaacaaagatttattagcagtgagacttttgctatggagacctcattatgcctataaaacattctactgtggtttttcaagtaagatagagagttgcttcttaagaaatcagaaattggcattatctaaagaaatgaaaaacatcacagaaatttttgacatctgcatttctgagactatgggaaatgccacaacagagacaaagtgggcggcgttctgaggattctgtgtcacatggtagctccaaaggctatccctggaccaactaaaagttatccaccatcccacaaacctcaagaatgtcctgacatacatcatgtatctaaaattctccctaattttttattattaatttattttcaaaatttaacaaaactctttctgaaattgactaaaatttatactaagttgacatgccacattcataatcacactgtgtatatttacaacttggacattaggtttgcccatgtagaaaatcagggagacctcgatctctttcttggaagatctggggggactgctaagtatatcagtgctttattgtcactcaagtgaactgcagcatagccatcccctctacaacaagacctgaagtcaatattgcctacaggtgaaaccaactagccctgtgttagaggaggaaatgtcatgatgagatgatgtctccgagcctatgcagttcacctgccaaggaaaagcccaaggtgctatgtattcttctctttaggatttaggattatcatttatgtgctgttacacagtgaaaccttgcttgtgtgtatgtgaaagctggttggcattgttttcaattcagtttttggatggctaacttgattgtttttactgtgctgctggaatgcctctgtatctttccgcctctttgcctatcttttctaaaattatagcgatgaatactttagccaaaaaaaacaaaaagcaaaaactctcagatgagagtcagaattttaaacattataaactaatggagaattgaagtgtatagagtcaatgtatttgacctcttactttttaaatgtttaatcatatttaattttaactacataagtagtaaatgctaatgctgagccacaatgcaacactctcactatattcaaatttaaagttttgtgcttctggagccctatttaataaatcttttgcataacaaatgatcataaagatcatttgggcatatagtaacttctggaaacttcattaatttatcttttatatttagatctataatccacctgtaattgtgaatcttatatgatgtcttcaatcttctggtgtcacctttgctatagtaagtgactctctttctgaacattttgttctattcaagtaaaatacttatttgctctcgtgccaatatgacactgttttactatttatagctttattatatgtcttgatagctaatagtgtaaatcatccaggtttctccttcttgttaaagattgctgtgggtatttttggtttatagtcaatttaatttgtggcttatagttgatttaattacttgtcttccttcttttgtagtagtactatacagctatatatttaccatagccagatgcctgccaggtatattctccttgactttggcttgactgttgacttgattttattgatagaacattggcagatatgagatgagcaaaggcttcagacatgcttgtttagttggcttctttctcttgtgttcctgacattgccatgagaagagcatatgctgggtaaccagggctccaaatgagccagattgatccaagctgccccagctgacttgcaaacctgaaactaaagcagaatcatctcagccaaccttcagaccttccagtaggagagcaaatgcatgctcattgttaaaaaatatgtttactcctagctttatttatttttaaataaattttatttcaaaatagttttagatttacagaaaataaaaatggatctagaaacatttatagagagttcctaaatacccggtttccactattactaataccttacatgactatggtagacactggagtaagacctaaaaacaccaaagaatctcctacttgaaacaaagatatatgatctgtaattaaggctttttgatttttcaccccagttttctttattttctctgctaaatacattttcaccactttagaattgtttggattttttttttttttattttagaatagttttagatttacaaagttagtagagtccccatgtactccatactcaggttctcctattattaatattttatgttaatatgatacactttttataactaatgagtcaataatgatacgatattattaaccaaagtctgtattttatttagatttcctcaattcttatctggtgtcttatttatattcctggatcccatccagaataccactttacatttagtcttcatgtctccttggctgcttttggctgtgaatttttcaaactttccttttttttgatcatcttgaccattttgagcagtattgctgaagcactgagtagtactgctgaggtagaacatctcttttaagagtttctgtgatgttttcctaatgattaaactggggttatgggttttggggaggatgaaaatagagaaataaagtccccttctcattacatcatatcaaaaatattgttaaatgaaagttataggaggccattgttttggactaagctcctgtagtaggctccaacaaatcagactaaaatcaaaatggagtcacctatgctaaagttccatgtcactaaactgaaactaagctatctgatattcccagaaatcaggaaagagagatgattaccaattactcaataagtcaatttcttttttttttcttttttgacacggagtctctctctgtcgcccaggctggagtgcagtggcgggatctcagctcactgcaacctccacctcccgggttcaagtgattctcctgcctcagcctcccgagtagctgggactacaggtgcgtgcccccatgcctggctaattttttgtatttttttttttagtagagacgggttttcaccgcgttagccaggatgctctcgatctcctgacctcatgatccacccaccccggcctcccaaagtgctgggattacaggcgtgagccacacacccggccagtaagtcaatttcaaactccaattggcatgataatgaagttccttctgttttaatccttaaaacacaaggtaacctgaagtgacccgatgctaaccaatcagttattttttactgttttgtttccctgttcctgacttccaaggaaagtaacttctaaatgaccaatgtgatttttgttttttgtttctgcttttttcagcctttactgtctataaaaccaacagcatgtgctcagcttcttggaacatttcctctcttttatagaatgaaatgttgcctgattctagaattgaaataaagataattgagatctttaagctaaatatgttctgattttgtcttttgacatatatcatcaacctgagttatcagtgtagatgttaaccttgatgacctgcctgtggcaatgtttatcaggtgtctctgacataggagttaaaaagaaattatttaggcagatactgacggtaaagaagtcctcagtaaggttttctttttaatgaaaagcagcccccaaatcttcttcttttctaacaaagagcagtttgtaaaactgagctgcagacacaaaaacgcaagctggaagcttgtatgggtgaatgctggcagctgtgccaataaggaaaggctacctggggctaggcgtattcaaaatggcggctccaccttcccctttccttgcaaaccacacaacatggccccaggccacgcaaagactccatttgcataataagattccagtagggcaaccagtttcctcatgcgctatgtaaatgtcacacctggtccaaccaatctttggatcctatgtaaatcagacaccgcctcctcaagcctgtctataaaacccggtgcattccactgctagacggaagtcccattggggcgcccctgtcgcttagcagcagaaaaagctgctctcttttcgctttcttttttctattaatccttcgctcctaaacccacttcttgtgtccgcatcctcaattcctttggtatgagacaatgaaccctgggtgtttaccctagacaatgatgctgcttcatttccattacaaagttactctttatttctctctaaactcttcagaagaaagtcactatgcacagctaatgcttaaggactggtagttatacttctccctaaagacagagagtaactacatacataattttttttctgtacaaatttgtctattttccccaatttatttacttattcaatcattcatttatttatatcagtgtggactcatggtcatttattttatattttgggttgtaatacaacactatgtcctgtattatgttccagcttatctttttccagctttggctattgagagctctttcagttagctcctgggtcctgggacagagacttaccattgcggaattttttttttttttttttttttttgagcactttctcagtttatagaacggtaaaaatgcagttttcattaccactgggtaaaattacttctagacctcttaagctgacaaagcctgaaaaacacgtgtgtacactaatctgtgtacttacaaatatccataaatatttctatatgtaaccatcattatttatattaaggtaaatacgacatcatgccaatgtctccaactctaacccaataccacatggatcattccagacttctcccctgcttatcagtagcattctactcccaacagtcagaaaaatgccccccaccacctgacatttatgtacctaattttaaaatttcaatatacatgtatagtggctatttaaaaactgttaacagtacccccattagatgcacacttatcaactgaggtacagtgcttatatagagtgtcttttggttttagtcttacagatcctactcatttccaatcttagctcagtatctcttcttcacttccctttagtgatgttgttttacatttgtagtacagttagattcttttgtcacattctgtattctgtttctggggtttcctggcctcctaaataattttttaagctaatacgcactaagtttcactttttgtgctatagagttctataggttttttgacgaatggatagattcatgtatttaccagtacagaatgatacaaaatactttccctgccctaaaatttcccccatatctcctcccctattgcatctattcaactttccccctgcctctgaaagccctagatctcttgaccgtctctatcattttgccttctttagaatgccaaagaaatggaatcatataccacagagacttttcagaccagcttaatcactgaacaacatgcatttaagactcattcatgtctttttgtggctcagtcctttttatcactgaataaaattctattgaatggatgtccacaatttgtttatccactaccctgttagatgacattttggttgctttcagtttttgatgattatcaataaagctgctataaatattcatgtccagattttttaagggtttagtgttcaaagcagtcagttaaatacctagaagtgtcactgctggatcctatggtaaggctatggctaacttagtaagaaattgccaactgccttctaaagtgactacatcaataatgaatgatagttcctgttgctctatatcctcatcagcatttgatattgtcagtgttttggattttggccatttcattcatcatgtgtatagttgtatctaatgttggtttaatttacaaatccctaatggcaaatgatgttaagcattttttcaagtgattattttcaatatgtaagtcttctttagtgaagtatcttttcagatattttgccagtttttaattggattatttcttaccttattgtattttaggagtttgatgtacattttagatgcatattctttataacatatgtgtttaacaaatattaatattttcttctagcttctgtcttgtatttttatccccttaacatctttccagagcataagttgttgggttttgtttgtttgtttgtttgttttttgacagagtccaattactgtagttttatggaaagtcttgaaattaggtagcatcagtccaataacttgttttgcttcttcaggtttgtattggccattctatgtcttttgcctttacatgtaaacttcagatcattttgtcaatacctacaaaacagctacctgagattttgattgggataactgggttgaaactatagataaagttgagaagaatttatctctacagtatatataatctatgaacgtggactatctcgctataattatattttttattttcttcaccatcaatttgtagttttctacacccagttcctgttatgttttgttagctatatactaaatatttctctctcttcatattattttaaataatatctttaaataccattttaaatttccaattccatctgttcattctgggtatataagaaagcaattggcgtttgcatgttgatattgtactttacagttttgctctattcactcattagtttctggaagtttttggtagaaattttgaaatttttgagatttacaatcatgccttatgtgaataaagactgttttatttgttgcttttctttaatttctctgttattattctttaattttctattattgtactagttagggattccagtacaatggaaatatgagtggtaagagaggacatctatctttcattctcagttttagaaaaaaaagtagctagtctctcatcattaagtaagatgctaggtatgggatttttgtggatgttttcaaattaggtttcagaaagcacccttttttattaattttatgagagtttttaaaatattatgaatgggtattggattttgtaaaaagctttcctggtatcaattaatctagcatatatttttttcttctttagcatgtttatatagttgaataaattgatttgttttcaaatgttgaaccagccttacatacttgaaataatcccatttaatcattctgtataattatctttatacattgttagaaaactttgctaatgttttgctgaagaattttgcatcaaagttcatgaaagatgttgttctgcagtttttctatatcataatgtctgtgtcttgttttagtttcagggtaatacttctataatagaatgagttaggaagtgtttctgctgcttctatttttagaagtaattgtggagaattcatattatattttccttaaatgttttgtagaattcaccagtgaaaccatctaggcctggtccttttatttttttgaaaattactaattcttgatttgatttattttaatatctataggctatttgggttatttctcctgtacattttggtagattgtatccttgaaggaattgtttcattacatataagttattaaaagtgtgaaacaaaattattcaaatattcctctttttctctctttaatacctatgagattagtagggctggcacctattttatttattgtattggtaatttacgtctctccttctttttatttgttagcctggctagaggtttatccatttaattgatcttttcaaagaagcagcttttggttttgttcagttttgctatttttttgtttccaatttcattgatttctgtcctattattatttatttccttctgtttgcttaggcttatatttctttagttctctagttttacaaggtaaattaggttattaatttttaggtttttttctagtatttgaattttatgctataaattttcctcttagcattactgttgctgcatctcatattttttttcaacttttattttagattcagggggtacctctgcaggtttgttaattgggtatattgtgtgatgctgagagttaatgatcccatcacccaggtactgagcatactactcaatagttgtccccctccatgctccctccctctagtagtccccagtttctattgttgccatctttgtatccatgaatacccaattttgcctcccacttaggaataagaacataaaatatttggttttctgtttctgtattaatttacttaggataatggcctccagctgcatccatgatgctgcaaaggaaatgatttcattcttttcatggctgcatagtatggaatactaagtattccataaaaatgtggtgcatatataccatattttctttatgcagtccaccattgatgggcacctaggttgaatccatgtctttattattgcatcccacaaattttggtgaactgcatcttcattttcatttagttcaaattttttaagtattttttttttagttttcttatttgaacatgggtaatttagaattcttttaatttcctaataatgtagattttccagctatctttctattattgatttctagtttaattccattatggtctggaatcatactttgtataatctatatttgttcaatttattacgatgtaatttatggcttagaatgtaatctatcttgatgaatgttccatgtgagcttcagaagaatgtatgttctgacatccatatttacagtattctattcatttcaattagatcaagttgctcaatagtgctattcagatcaattatatccttactaattttctgcctccttgatctaacaattactgaaaaaggcatgctaaggtttttaactattatagtgactattctatttcacctttatttctatcagtttttgtctcatatgttttgatattctgtttgtaggtgcatatatgtttagaactgctgtctttttggagcatggaccctttatcattatacaatgttcttctttatccttcatgatcttccttgttctgaaatcagttttgtctaaatttaatatagctgctccaaatttcttttgattaggtttaacatagtatatattttttcatctctttacacttaatgaaatgtttatatttaaagtagatttcttgtagacaacatagagttgtgtctctagtgttaaaacctactctggaaatcactattttcagtagactttttagaccatccacatttaaagtgattattgatatagtcataataatatttgccatatttgtgactgttttcgatatcttgcaattgtacttagtttattttgttttttaaatcttcctctctttttctgccctctatggttttagttgagcatttcatgtgagttcattttatctcctttctaactatatcatcatggtttcttaaaagcatgtagtcttgacttatgcacttatgttctgatattaattcaccttcaaataatgccacaccacttcacatatagtgaggttatcttatccagggttttttcagttcttccttcttaccctttgtgatattgctgtcatctgtgttgctgctccatatattacaattatctaataaactgctgctattattgctttaaagaaatggttatcttttaaataaatgaagaataagaaaaataaaatatctttctttaccattatttatttcttctccagtgctcttcctttatgtatagcaaattttcagacctataatatttttcttctaactgaagaattttttagcatttcttgcaagtcaggcctgctagtgattaattctctcagtattttttgtctgataaagtcaatatccctcatttttgaaacatagctttactagatatagagttccagattaatgtttgctttttttaatcactttaattaatttattttaaattaattaaatttaaaatttaattaattttaattcttgctttcatggtttctggtgagaagtctgctgtaattttaacctttttctctatagataaggtgatttttttctccctctgacgtctttcagaattttttgtctttggttgtctgcagtttatgatataatatgcttagagatgtgtgtgtgtgtgtgtgtgtgtgtgtgtgtgtgtgtgtttgatatttgtgctgcttggtgttctctgagcttccttgatgtaccatttagtatcttttattagttatagaaaattttggtcattattacttcacatattttttctgcttcattctatcttaatttccattggggtatccaaattacgtgagtattatatcacttgaaattgtcccacacttcctggatattctgttttgtctttttcattctttttgcattgcagtttggaaagtttctattggactatcttcaagcttacttactctaccctcagccatgttaaatctactgatccagccatcaaaagttttctgcatttctcttacagtgcttctaattagattctttttaagagtttccatctctctgcttatattacctatctcttcctgcatgttgtctcctttgtccattagcggccttagcctattaattataattactttgaatttcaggtctgataattccaggattatctgattcatatccgaatctggttgtgatgattgcttcattgctgcctctcttcagaatgtttcattttgttttttatctgtttacttattagcaggtcttgaaattttttgatgaaagttggacgtactgtattaggtaatagagaaatggactgttagtgagggcatttatgttaatctgcacaggggtttggctttgttaagtgcttgctgtagctataggtgccagagtcacaacatttctgtaatgtccttgttttgttctcttttgatatttgattttcataattacttttcctcaaagaagagtaattgtagcttttctagttataattcactgttacactttgagccctgtagatgcagtggtaaaatttgagaggtgggaagcatcctatagtcttcccattaagtctcagtcttttagtgggtctgtgtctcaggactgtgagtttcacgaattttcctatagtgctacagctttcccctacatccctaccacagttcttggctgaagtgttcccagtttatctccttaaagccaattacctccctcttaactgtgtgaactttttccccttaggtgagacagaaaaactggtggcaccaagatcaagccttttcctcagctgagacaaaactgtgacagttttctctcctggagagtaaggctttgatatgaaggaggctttcactattacacatttgctcctttaccagaaccatgagagtcaatattttcggattctcactgcgagaaactggtggggttctcctgaaggtaaagcctagaaagtgtgactctcctcctccccacacctttacccaccaagaccgtccctcacagtagtttctcaaattcattctagtccatactcagcctccagcaattcatcaaaattgccatttaaatgttcctaccagtttatgactgcagtagatactgctctaggtaaatagatgtctgctatgactctctctaggtgcccctttctctccagattccagggtgttggttttccctgaaatctcagttctctgatgtgtccaggaaaagtcacaaattttcagtttatccaattctttcttatgataaggataggaattatgacctctaaactctttatttgatagagttaaaacaagagaagtgctcgctcttttaagcctctgaatttttggataattttatatgcagcaattttatagaaataactagttgacacatttaatcacatactgtatgtgtgtgcgtgcacttatgcacacacacacgattttgattgagattacattgagttcaaagatcttttgaagggagttgacatctttacaatattatttgttctgattaaatgtatggacatagtacatcttcaatttatttcttaaattatgcactgtagtttgctgggtagaattctgaaacattttttaatcataatttgacttcttttgatatcataaatagcatattaaaatattttctatttgttcatggtatatataataaaaatatatatttatttatatataaaaatgtataatataaataaaatttaaaatgtatacatgaaaattgctttttacatttttttaattttggtgtaattcttttttttttctttttttaaaattatactttaagttctgggatacatgtgcagaatgtggatgtttgttacataagtatacatgtgccatggtggtttgctgcacccatcaactcatcatctacataggtatttctcctaatgctatcgttccctttgcccctcaccccctgacaggccctggtgtgtgatgttcccctccctgtgcccattgttcagctcccatttatgagtgagaacatgggatgttttgttttctgttcctgtgttagtttgctgagaatgatggtttccagcttcatccatgtccctgcaaagggcacgaactcattcttttttatgactgcatagtattccatggtgtatatgtgctacattttctttatccagtctatcattgatgtgcatttgggttggtttcatgtctttgctattgtgaatcgtgctgcaataaacatacctgtgcatatatctttatagtagaatgatttataatcctttgggtatacaccccataatgggattgctgggtcaaatggtatttctagttctagatccttgaggaattgccacactgtctttcacaatggttgaactaatttacactcccaccaacagtgtaaaagtgttcctatttctccacatcctctccagcatctgttgttttctgatctccattctcactggtgtgagatggtatcttattgtggttttgattcgcatttcgctaatgaccagtgatgatgagctttttttcatgtttgttggccatgtaaatgtcttattttaaaatgtgtctgttaatatcctttgcccactttttgatgggttttttttttcttgtaaatttgtttaagttccttgtagattttggatattagccctttttcagaaggatagattgcaaaaatcttctcccattctgtaggttgcctgttcactccgatgatagtttcttttgctgtgcagaagctctttagcttaatcagatcccatttgtcaattttggcttttgttgcaattgcttttggtgttttagtcatgaagtctttgcccatgcctatgtcctgaatggtattgcttaggttttcttctgggatttttatggttttaggtcttacatttaaatctttaatccatcttgagttaatttttatatacggtgtaaggaaggaatccagtttcaattttcttcatatggctagccagttttcccaacaacatttattaaatagggaatcctttccccattgcttgtttttgtcaggtttgtcaaagatcagatggttgtatacgtgtggtgtcatatctgaggcctccgttctgttccattggtctatatatctgttttggtaccagtaccatgctgttttggttactgtcacctggtagtatagtttgaagtcaggtagcgtgatgcctccaggtttgttctttttgcttaggattgtcttggctatacgagctcatttttggttccgtatgaaatttaaagtagttttttaaaattctgttacgtaagtcaatggtagcttgacagggatagcattgaatctataaattactttgggcagtgtggccattttcatgatattgattcttcctatccatgagcatggaatgtttttccatttgttcatgtcttctcttatttccatgagcagtggtttgtagttctccttgaagaggcccttcacatccctcttaagttgtattcctaggtattttattctctttgtagcaattgtgaatgggagttcactaatgatttggctctctattattggtgtatagcaatgcttgtgatttttgcacattgattttgtatcctgagactgctgaaattgcttatcagcttaaggagttttggggctgagacgaaggggttttctaaatatacaatcatgtcattctgcaaaaagagattatttgacttcctctcttcctattttaatactctttatttctttctcttgcctgattgccctggccagaacttccaatactatgttgaataggagtggtgagagagggtatctttgtcttgtgctggttttcaaagggaatgttttcagcttttgcccattcagtatgatattggctgtgagtttgtcataaatagctcttattattttgagatacgttccatcaatacctagttcagtgagggtttttagcatgaaggggtgttgaattttatcaaaggccttttctgcatctattgagatatccagaaaatttagaagaaatggataaattcctggacacatacaccctcccaatactcccaagataaccatgtggtttttgtcattggtatgtgatggattacatttattgatttgcttacgttgaaccagtcttgcatcccagagatgaaactgacttgatcgtgatgcataagctttttaatgtgctgctggatttggtttgccagtattttattgaggatttttgcattgatgttcatcagggatattggcctgaaattttctttttttattgtgtctgtgtcaggttttggtatcaggatgatgcctgcctcataaactgagttagggagtcttccctctttttctattgtttggaatagtttcagaaggaatggtaccagctcctctctgtacctctggtagaattcggctgtgaatccatctggtccttgacttttattggtcggtaggctattaattactgcctcaatttcagaacttgctattggtctattcagggatatgactgcctcttggggtagtcttgggagggtgtatatgtccaggaatttatccatttcctctagattttctagtttatttgcattgagtttttatcacttggctccctgccttcagccccctttccaggggagtgaatggttctgtctcaatggcattccaggtgccactggggtatgaaaaaaactcctgaagttagctcggtgtctgctcaaacagccatacagttttgtgcttgaaacccagggccctgttggtgtaggcacccacgggaatctccttgtctgtgggttgtgaagactgtgggaaaagcatagtatctgggccagatagcaccatccctccaggcacagtccctcacggcttgccttggctaggggagggagttcccctaccccttgtgcttcccgggtgaggtgatgcaccatcctgcttctgcttaccctctgccacacccactgtcttaccagtcccaatgaagtgaactgggtacttcagttggaaatgcagaaataacccctcttctgcattggtctctctgggagctgcaggccagagctgttcctatttggcctttttgcccaggagtttttcataagtttttaattgaaataaaacatatgtgacgaacaatacaaaaatcattagtgtacactttgatggattttacagctcactggtataatcatcatgccagcagcaaagctacatgccaccatgtagttcttatacccaagcacgagtacccactttcctgacttctagcagataggttattcctggctgtttcatactttatattaattaagccatactgcatatattcttttgtttctggcttctctcagcattatgtttttgatattctaccatgttgttgagtataggttcatggagtttcattgctcatggattcctgttgcagatagttcatggagtctcagagctatataatactcaactttgtaaatgttccacaatctatatatccttcttactatcaataggcacttgggtcatttccaatttttaactattatttacatatatttttgtaatatatatacatatctgcagcagtattatggaaacaacttatatatgtaatatattaatgtaatacctatatacatatatttttgagtgaatatgcagcaatattatggaaataactagatgtatgttatatataactagttgacacattatatatatatatatatgaaattcaattcatcattttcaaaaataaatagccttttgggtcttgtttaagaagtctttacttactacaatgccatgaagctattttctcattttctttctaaaagctttatattttacttttcacatttagaccttcaatctttatggaattgttgttatgtatggtatgagataggaatcaacacatatatgtatatattcatatatatttttctatatcaatatacaaaaacacaaaaccatatactaaaatcaccattcttactccactgtactagtgttacctctgacacaaatcagatgaccatacatgtgttgagcagtttctggtttctttattcttttccatttgtttgttttgttgatttattgatttacctggtgtctatatcacaatatcttaatacgtatactatatatttggccttaatatctgatagtacaagtcatctagtttgtatttaataacaataacaaccactttggccattctagttcttttgcagttccaaaggaactttgattctaaatttttataatcaaaactctgataaaaatgttgcattaaattacactgtattttaaatcaatttggagaacactgaaattttaaaatgtttagtcttttattccatgcatataatctctttgggtctttcaaaatttcttctcaatagcatgttactgttttcagtgtagaggtctttcatgcctattattagatatatttggagctatttgatgtttttgatagtattttaagtgttattttatcaaaattgaattacctatgtatttattgctgatgtccagaagtaaatatgatttttacattaaccttctattcaaaggccttgttacattaatgtattaattctacccatgtgtctacagagtattttgtttttttaatgtacaaaaccatgttagctgcaaataataaaacttttcttccttcctattcaatttctaaacagtttatttttcttatctaggtcttacctaggacatctagtctatagctgcacctttattttattcagattttaattttaaaggaacaaatgacaattttcattgtgtgctgtttattgtaggttttgtgtagacactattatcagatcttaaaagttgttgcctatacctgttgtgctaatagtttctttttaatcattaatgaatatataatttcatttaaatattttcccccattaattaagaaatttttttttcttttttctgttagtgttgtaagtgtcttagttgaattttgaaggataagccaactttaaatttctggaataaatcaatgtcatcatgatatattgtcctagtcatatgccactgattttctaaaacaaaacaaaagactacagttaatccatcccccctgaataagataaaaatattatttcagctctctagccttctatgtacactaccatctatagaataactaaatttgttttgtttactatatgttagatgttcttccaggtattaaatctatattaacctctttaatactcatgattaaaatgagaaatgatatctcatttctatttcacaaatgagaaaattgaagcaggaagaggttaagtaccatgccgaaggtcaccccaaactaaattttgttcctggctggctgattccagagctggtgtgtttgtgattccaccatgctgctgggctgtgtctttcagctgagatttttaacctcaaatattttaacaagttatttagagataccaataggattctctggttttcttactattgtttcttgtacactggattcgtttgtttctctactggatcatatctgctattgcatattttagagaaagtctaggtatgataagactcctgaataaatgcatgtctgaaagtatatttctttattttcacatgtaaatgatagcactgggaaatatggcggtacatttatttcccctccacttactcttgcatgtatctgttccaaatctccaaacactaggatctttgaccattctttttttgtcattccgaaatttaaccacaatatgtgaatagctatatcttttacaattcattctgctcaacagaccttcttatcctgatgatgtatgacctctttaatcctgagaaattttctctcattgttttgagaatttcaggctatatgtttaagattcttgcagcttcattcaggtttacttaataattttttcacatacgaagacatttataagagaaaaaaacccttcataattatatcatccagatatatcaactgttatcatttctctgtaatcgtctcttataagccatgtctgtggtttttaaataatttaaatcacttgatgtttagtgctatattttgcttttatctcattacgtgttacgtattttttttacatatcgcagagcattagtaaccatttaaaggcttattttactccattgagttaaaggcttaatttattccattgagttgtcaaaactttttttacctagaaaaaaaagattctggagagacaatcacattcttacatgtagcttgacaaaccacccacacctttccctgctaagcccgatgagtttacagccaactaagaaaccataggtattagacagatagaaatttaaaaatactaactttacaacttataaaattaagtgaagaaaaaacactttgtctggtagccagggcgcacatgggatcccgcacttagaagagaccagcccttggtttaatgctactccctcaacactttcaaattagtcaccatttttgaaaagggagctctgcatttaaccgtgcacggggctctgcagattatgtagccagttctgctagtagccttagtcagtatttctagtgtttccttttaagtctggaccttgtaatgaccccccatgaaaaggaatttgcagagctgacctttgcttttcagctgaaatgggatcactcccgcccttacatcaagccccaatttcaagaacagagagagaaaaaaggcctcatcactaacctctagatgtgtttatcccttggagagggagctgttgaagaggatcactgttctttcccaaacatttgaaagggcagaggcactgctttatgagctaagttatgacttcctaaagagggaggaacatgtttttcctatgacttcaaaaatgtgaagggctgtcagtggaaaagatctctgattgattcagaactataacaggtataaaactcagtcagaagagtgaaagtaagaggcaggcttatttggagagaatgtgagattaatctattttaaaacgagtattactgaaaaactagaatctgataacttgagatataaaaatttgttatcattggaaatattcagccacgaaataactgaatgcatatctactgggaagaggtctttaaatacagagttgaaactactgcttcaggaggaataaataaaacaacttcctctgtaatttatttcgttttccttcttcaagggatgcgttattaatctattgctgttcttttctgttcttttaatttttcaatactctttcaatattgaatacatctctaagactgtgcttatatccatactcaactgtctttcaaaagtatatatgtatatatcacttttattaaatatatagtaagaagttattgtatgtttcctattgcaagccactggactgaaatttaaattatgtatataacatcttacttgattttatcagatactatcattatcccattttatagagcaagaacccaaggcttagataggtttactgtcatgttcatagatacgcagctagaaaggcccataattttattcaaactcccacccatctgattataaaactaggattcctaaataccacaatacagtgtttaacacatcctaatatttttgccctatatttatacacactcaaggtatcaaaccttttgcctttttcccagcaatccggcatacctgtcattagaaagttctgtagttaatattactatggcaaaaaaaaaaaaaagaaatgccacatctgactggtaatcatcatggaaattccatgagatgggtagagtttattattcccatcatggatgaagcaacagaaatttagaaagattaaataatttgcccaagaacccaggactacttttttatcaattttcaagaatacagtatattactattaactatagtcactatgttgtacaatagatctcttgaagttattcctaagattactcctaattgctaagagagtagtttttaggttttctcaccaagaaaaatgacaagtttgtgaagtaaggtctatgttaattaacttgattgagccattttacagtgtacgcatatatcaaaacatcatattgcacaggtaaatatatataattttatttcccaatttaaaaataagtaactaaatgaaacaaataattttaaataaacaaaaataaaattaataaatatagacttttaaatcattttgtattattgaaattcatagaaattaaatatacataaaaagcaaccacactgtatttttttggaaaaaaaaatttgtttttcatacaattgtatgtttgagtaagaaaaaaatcattcaactcctatctttgatttattatttttatttgcatggtttacactctgttcaagcaaggattccctatctggacaccacaagctacctataaactgatattcgctttgtgaatgaattacacaagagaaaaataaagctcaaaatctgcttgtcaaatcaaaactcaaaaagatagtaaatgctactatttaaatttctagatatcaaacaacacataagttatgattacctgtataactttttaacataataaatgaaatttaaacattaaatttaaaaaagaacccatgaatagtgacttgatagagaggcaggcacaggaacagacaccttgaattacactaaggaaaatactaaggcttcaaattaggatgaaagaactgcagaatttggcagcagccatgatccttgaatctttcttgcatcctggcttcctttgtcacttttgtgatctcagtgacttgtcatttttgctccttggttttccatctcagacactgagctgactcataatcccccagggcagcagtatggaaccagaacaaccctgtcccagacagttcagttgtgttttatcaatgtctcactcatacgacccactttcttcctcattgtcatggccacagtcctatgtacctttgctgagatggtgttcaaagaaatttcacagcttcactttgttctcaggtacatatgaatgttcaggggccgtcccttgccttcattctgcatttcagtattaagagtatctttcttactgaaataataacagaagtttttctttttgcttttctaacttcactgaactataccatattgagtctttggattaaaaaatattgcctctgccttctttccatgatattgcatagtataaaagagattccttaatttatgcttgagtttatcactaaacagatgattattttaaattaacactttttatttctttacttgtgcttcaggaaaatgccacagagaattatttaagactgttgggcttggcgtaccattcgtgttcttcgggttaatgaccagtttcctcaaactacaaaatgctaacatttcactgtttcatcatagaatgcacaggctttatattgatgcagagaagggctttcacagccccagaatgaagctaattgtactatttattatactatttatacttgctgcacctccttccattcaaggagagagaaccttttaagagccctgtcaaaactgcaggtgtgccagaggctcctgctaacagcaggggcaggctttatagcatttcctcaagactgcttcggatcacttttcagtgtgtaaaaccggattttcattaatggcactaatgacacgctaatggggacagggcagcacacccaatgccagaggcagagcaagccaggctgaaaagtggccagcccaagctgctgtaagatgaaatgctgcagggtgttgatacattgcatttcttctcaaataccaggcaggcccagggcctacttgttaaatgggttgcctttgaggctgagcagaagtggatctagttacagtttttcacgtaaggacaaaacaagaagacagaaaaagctcaggcttcagacatttgcaagctgcagctgtttttcatggcaggagattctgaagacttatgagctgacacattaccctcgacattaccatgcattgacctctctgctccttcttctccctggagtggtgttcaaggctactgtttgacacaagggccaccaaagaccatatcaaagcagtggccccatcacaactcatcacttttaaaacacatacaatctgctctaggtggaaatgtggaggagcaaatccagtgttctggcctttcctccagggagggagctcaggtggacggtagtccctgatttctaaagcagctcttcatggtaggtcagtgtaatttttaaacaaatggtgtaagggcaagggaggctacagaaggttgatggagatggattattttgacttccttctccttgtgtgatccatcagcacggaaaaggcttactgtgcattattcttacctttctttgatcttttttagggaatgctgggagaaatgttggcctttccggtttgcttgagtatttgtaatattaaaagcaatgaacaggctgcttttcagagaggatggtcagtcacagaaccaggaatgcatcttaacaatcaggtctataggcatagcaaaagcaagttgcctacaacacctcttcctctctctttactgaagcacaagatattggcatcctaggaaaaactcattgtcattcctgttctaattttacagacaaaggtgaaagatgcagagggaagttgaataacttgtccagaattacatagaagtttgcgaatgagccagaactaggaacctggtcttttaactttccatccactactgttctctgctttgtattgcttctcaagaaaatctcctttaaattgtggctgtgcaagttgtgccgccacaagagcctctttggtagggcagcagttgcagagtcagcctcctggtcagtagctgatagttctgcttctgtcgtatttgacatagttgcattcccttggatgtcatagctgtctcctatgcagggcccaagcaaaagggcaggaccattgttaattctcttggtcatttttcactgagacccatggagcttccaacaggaactttccttctaatgttccgttctggaaaattgggattttcttccattttatttctccagctggataatccctccaagttttacactgtgaatttttcatcaaagtaattttctcacgtccatatttgtagcattaaattaccaagaattctttgcaattcatgtgtacatagtagccatttttatgtcagtacaaaggattactatgctgaaatacacataatgaagcaatgggagttagccatttcagcattcttttttttttccctctttatctagattttggtttggctggcacagaagtatgaccacaagatggacctaaaatatgcacatttgtaagattttcccccatggtaagtaaatagttggctctctgtgccagtgcactgacataaagctattttgaatattcttgttaaggctggtggaattaggttgtgatagtaaagaatttaatgtatcttgaagggccaggataaaataattgaagaaacaaaagcatgagttagtaatcactggagaaagaagaatggacttaaaggctactttgcttgcttctttggcttgagatgataaaatgaaataataagaaaggaaatactctgtgtaatatggcaagttttatatatatatgtatatgtgtgtatatatatacacatgtgtatatatacatgttatatgtgtgtgtgtatgtatatatacacacatacacacacatatatgaaacttgtcttattccacaggagatacatatgtatatatacacacacacacaaatatatttaaattatattttaaataaatgtaaacattgtaagttgttttattcttgagtcaaatgattagccttcccataattgacatcctgaattcaaaatcagcaagagaatacaaattctcatagtacagtctattggttagttattgccacaataatgttgcatacaaccacaaaatctcaatagcatgcatttatttctcatgcatctgtgggattccattgatctgggcctgacttgctcatacattcacagttcagctggcttacttatacacgtctaggttggctctgttccacgttattgctcatcctcttcctgggaccagtaggttaagctgagtatgtcttttcattacaatgacagaggtacaagaactagtggaaacacacaaatgcttttttaagcttctgcttatatcaagtcagcatttatcacaaagcaaatcacatggccaagaccagtttcaagggatggggcaggtcactctgtccacgtgggagggacctgaaaatttacttagcaaagggcataaatacaggaagagatacagatctggatcaactactgaaatttaccatatagacacaccattgaaatcattagtagaagcaatggattaactgactataaagcaatctgactggattttaataatacaggacctagtggaaaacactggaagaagaataagcagtataacaatatcatctataaaaatttaaaatgtacaaactcagtaacacattcaaataaaagtaccccaactgagcctactaaaatggttgactgtggggaaaagagaaacatatctgtagtgtagtatatggatatacttctggatatatacagaaatatattcttgttaaatgttaaatgcagttcctgccatagcttccttttccatggataggaagggagttatggaaggagctgcatttaacatttaacaaggaactgcatttttaaaaaaagtcattggtatatactctgaccactagagacatatttgcaatcatgatcaacagaccattcatcaattctgattttaggccaataaatgaggtagtcttccttagggctaagtgatggtcttcaggttacaaaatctccccttctcatagttattttctcaaaaggctcaacaaagccacttggccctaacaaatacacatacttgtgccctattatcagaaattctaaatgagtagtactgagtatgatggttaattctatgtggcaacttgactggccaaggggtgtctggatgaaacattatttctaagtgtgtctgtgagggtatttctagacgagattagcatttgaagcagcggactcagtaaagtggattgtcctctccagtgtgtttgggaatcatccagtcttttgagggcctgaaaccaaccaaaggtggagaaaggaggaattcacccagtttgtctttcctcactgctgagctgtgatgtctcatttcatctcatcttctctggctttccaggtgggattcacaccatctgctccccggttctctgatccaatctgtattcatcaccagatttcctgggtttctaacttacagacaacaaattgtgagacttctcagcctccataatcacatgaaccaccttctcttaataaatatatgtatttatgtgctgggctcagtggctgacacctttaacaccagcaattcaggaggccgaggtgggcggatcacctgaggtcgggatttagagaccagcttgaccaacatggagaaaccccatctctactaaaaatacaaaattagccaggactggtggcttatgcctgtaatcccagctatttggggggctgaggcaggagaattgcttgaacccgggaggtggagattgcaatgagccaagatcgcgccattgcactccagcctgggcaacaagagcaaaactctgtctcaaaaaaaaaaaaaaaaaaatatatatatatatatatgtatacacacacacacatatatacacacacacatatacacacacacaaaaaaaacacctctatttttataaaactttctccttaagaattttgatatatttcaaaagtcaagaactcttgacccaaacatgctgtcgtcacaaagacacaagttaatttgtaagagaaaaggtacattttgtcagtcccattttctatttccacgctttttcacacccttccaattggctaggtgcttccatccctgagagttattatctccttttgctagttcttcccatttccctcttgacctaaggtttagttaacttgtttctgcttacttgcttttctagaggattaggcaaagttatttataacaagaaacagagtggaaatattgttctcttgtcatagagaacaaaataaaagactcatagcctttctagttgcatataacattgatcactttatacctttcaaagcacttccatgttctgcactttatcccttgtattcacaaacagatatgatagcatagtggcctggtaagatagttcagctcttcatctagagagctaggttgcagccctggctttgccaatgaccagctaggtgacttggaacaagtacagtggttcatgacttgccctgcccatgaatagccactaatagatacacagccagtcctgctctaagtcttgttttggaaacataaatttgtgtcagtgatattgatagactatggaagaatctgagcataacatgaattgtgtgtttgcatattatggtagttcattttcacactgctgataaagacatactcgagactggacaatttacaaagtaaaaaggtttaattggactcacagttccacgtggctggggaggtctcacaatcacggtggaaggcaaggaggaacaagtcacgtcttacatggatggcagcaggcaaaaaaagagcttgtgaagagaactcccattttcaaaaccatcaaatctcatgagatgcattcaccaccacaagaacagcacagaaaaagaccagccccaatgattcaatcatctcccactgggtccctcccacaacacatgggaagcaggggagctacaagatgagatttgggtggggacacagagccaagtcatatcattctgcctctggctcctcccaaatctcatgttttcacatttcaaaaccaatcatgctttcccaatagtcccccaaagtcttaactcattacagcattaactcaaaagtccacagtccaaagtctcatctgagataaggtaattcccttccacctatgagcctgtaaaatcgaaagcaagttagttacttcctagatacaatgggggtacaggcattgggtaaatacagccattccaaatgggagaaattggccaaaacagagggccacaggccccatgcaagtccaaaatccagcagtcaaatcttggagctccaaatgatctcctttgattccatgtctcacatctaggtcacgctaatgcaagagatgggttcccatggtcttgtgcagttctgcccctgtggcattgcagggtacagcctccctcccagctgctttcacaggctggcattgagtgttgatggctgttccaggtgcacggtgcaagctgccgatggatctaccattctggggtctgggtttggaggacggtagccctcttctcacagctccactaggtggtgcccattagggactctgtgtggtggctctgatcccacatttcccttcctcattgccttaccagaagttccccatgagggctctgcccctgcagcaaacttctgcctgggcatccaggcgtttccatgcatcatccaaaatctaggcagaggtaaccaaacctcagttcttgacttttgtgcacccgaaggctcaacaccatgtggaacctaccaagacttggggcttgcaccctctgaagcaatagcccaagctgtactttggccccttttattcatgactagagtggctaggattcagggcaccaagtctctagtctgcacacagtggagggaccatgggcctgacccaatatttaagacgtttattcctcctaaacctcctggcctgtgaagggaggggttgtcacaaaggtctctgacacacgctggagacattttccctattgtcttggtgattaacattcagctcctcattacttttgcaaatttctgcagctggcttgaatttctcctcagaaaatggaattttctcttctatctcattgtcaggctgcaaattttccaaacttttatgctctgttttcctttaaaactgaatgactttaacagcacccaagtcacctcttgaaagctttgctgctttgaaatttcttccaccaggtactgtaaatcatctctctcaagttcgaagttccacaaatctctagggcagaggcaaaatgcaaccagtatctgctaaaacataacaagttcctcatttcccaacaagttcctcatttccatctgaggccacctcagcctggactttattgtccatattactattagcattttgggcaaagccattcaagaagtttctaggcagttccaaacttctcacatttttctgtcttcttgtgagccccccaaactgttctaatccctgcctgttaccaagttccagagtcgtttccacattttcaggtatctacagtagtgccccactctactggtaacaatttactatattagtccattttcatgctgctgataaaggcatacccaaggctgagcagtttacaaaagaaagaggtttaattggactcacagttccatgtggctgaggaggcctcacaatcatggcagaaggtaaggaggaacaagtcatgtcttacacggatggcagcaggcaaaaaaagagcttgtgtggggaaactcccattttcaaaaccatgagatctcatgagacccatttaccactgtaagaacagcacagaaaaatacccacccctatgattcaatcatctcccactcagccactcccacaacacatgggaatcatgggagctacacgatgagatttgggtggggacacaaaggcaaagatttcacatatgcaagatttcatccttgagaacactatatgcatacagaaaactgcactcagtcgaaatgaactatgtaactgtccacaaaatgcacacaagcagacacctcaaatatctactggctacttcagctcactaggagccacaactatacatatccagtgttacaactttctgatttcaagtaagcctctctccacccttcacagtcactcacaagagcaacctttctaacatccccatccacaggcaagcttcaggtcttttttaaagcaggacaccataattattgtaatatttaagtgacataagtctgtatttctagacctttgggacccatttgacatctcaccctgcaaaggcttccaaaatagcctaattctgagagtgcttttctgagcttcagcggaagcatgggagaacactgcccaccttcccgcatttttgtctcctgcatctttcagttattcactctttaggaatgtgccaaggtgaaatccatgttgaattcaatataagccttcagtctcacccatttttgaaacagaagcagtctctgaagaatggtctagcacaattttcaaattgtttagatgtgattctttgtaaaatgaaggaagaaggaaacatgaactctaaaattttccaatttggggtcacaactggtcccactctagtcacttgggatttagtattcatattcaaaatgctgagacttaaagtttttttttttttttgaacatttcattagcactggagtcacaccccagtgtactccataaggtaacaaaagaaaataaaagcaaaaatctttatcccgtgttattgtttagtgagtcagtcacacacaacaaaggcagtaaatctccacagctaaaaggagcttaatggttgaaacatcctcaggggatatgagaagcagcaaaataataattgcaaagaataacacatgatgcctgcgattactaatgtttagtttctgaagatcgctatagtataatatttgaaagtgaattactgtattaatcctcactagaagctccaaagaggagtattttcagttttaatacagacttacaccatgactaaaggttcttttaatctttgttccctatctctgtctttccgtaaaatggtccatctaaattttcttaccttcctaaagtggaatgaggattatctattaaatagtttcaaagcccctgggaaatgtgaattgtggcgctatgactgcatgacagtagatggagccgcgaagacatgaggaattggctgattcactggggagagaggacaagtgtcagtgagtataggaaaccttcattcgttgatcccaagggatcacagagtgccccacggtccattcatgggcactgcacaaagaaacagaaagaaacctgcatgtcctcttcatgctcacaatggaaacaaacctcacctcttccctcactctcttcatgttccccaagttataaagttataagtaaaataatatcaaacactattttttattccatttttatacaggcatttataccttatttagctttttatattgaaaaaaaagtagcaaaaagttgcaaaaaaattacaataaactttacaatacctgtcacccatattcctcagtcattgacattctgctgtttcctctctctctctaaatagatctacatctctatctgtatgcatgtacctacatataaatatatttatgcatttgtacttgaaattattaatactgacgaaacttttgagattgtttcagacatcataactcttaatttctaattacttcactgtgtatcttccaagaatatgaaaattttcttacataaccacaaaacaaaagtaaattggagaaatttaatattgatggaatacaatagtgcccccttattctcaagagatgcattccaagaccaccagtgggtgcctgaaaacacagtactaaaccctatatagactgtctccaacttactatggttcaacttaagattatttttgcctttaggatggtatgaaaccattctgtttttcactttcagtacagtattgcataaagtaatgggatattctagacttttttataaaaggggcttcaggttagatgattttgctcaactgcaggctaacgtaagcgttctgggcatgttcaaggtgggctaggctaagctatgatgtttgtcaggttaggtgtattaaatggattttcgatttacaatatattcaacttacaatgagtttataaggatgtaatcccattataagtggagaaacatctatacatactgtttttttctatgcacatctataataaagtttaatttataaattaggcacaggaagagattaactgttataaaatagaatgattatgacaatatactataacaaaagggtatgaatgtactctctctctctctctctcaaaatatcttattgtactgtactctaggtaatggaaaccatgaaaagagaaatcgtggataagcaggtgctaccatacacacagtttctgacttacaatggtctgacttacagtttttcaactttaagattagtttatcaggatatagtcccatcaaaagtcaagaagcatctggattatgatggttcaatttatgtatttttaagatgggtttataggagtattaaatacatttttgacttgtgatgtttttgacttacaatggtttcatcagtatgcaattttaatgtaagtcagagtatctgctattatctaatatacaatacaatccaagtcaaattctgtccattttcaaaataatgtcttttgtagctattattttcagtctaggacacaattcaattttatgtattgcatttagtttttaatgttgtttagtattctttaatgcaaacagttcctcagctatctttgttttgtatgtcattaatatttgaaaaatatatgaagattaatctatacaagcatattcctgtgtgtttcttaacaattagatgcaggttatattattttgataggaatactacagaagcttgagacaataactatttctttagttcataacatgggttggcaatttggactaggctcagccaggcgcctctgtcctgtctggcctcactcatgtttctgccaccatttgaccaggaggctgagattgactgatttaggatggccacagctgagatggcttgtatcttctccaaatggtcactcatcctccataggctggtctgagtttgctcacatggcagctggccagggtttcaagataataagtgggaacatgaaagagccttgagacccgggcttggaagccgcacaacctcatttccatcacaatgtacttgtcgtagcaaattataagaccaagcaacattgaaggggtgggaaattcaactccatgttttgatggtaggagctgcaaagtcatatttcaaagcatgtgaatttagggcatggaggagaattatggctatttatgcaatcacagatagctatcaccatccacagtttatagtagtttttagcagtgttcattatcaaaaggaagtcatagcatatggcttgccattcccatcagcagcctctttgaatttgctatctgaaaataccaggtgtaaaaccctgctggttgagaagggttcagtgtagactaactctacttaagggccaaaaacagcttagtatattgttaccaacttgactgtgatttcctccatacatatagattatttgtaactttgagtttaacacattgtgtccattttatagactcaatctattgagaaagagttggatctctctctctctttgttttagaggttgtcctcgctctgtcgcccaggctggagtgaagtggcatgatctcagctcactgcaagctctgcctcctgggttcacgccattctcctcctgcctcagcctcccaagtagctgggactacaggcacctgccaccacgcccagctaattttttgtatttagtagagatggggcttcaccgtgttagccaggatggtctcgatctcctgacctcatgatctgccctcctcggcctcccaaagtgctgggattacaggcgtgagccaccgtgcctggctggatctattattttaagtaatcaagggttatatgtcacattgtgtcttgtcatattacatgaaagggctttgttgagtcaaggcaaaaagaaagaatgatggtttttcagactttataaaacactgcgacagacatcagaaaataacagacccaagactcccagaggatgactggggaaagccagcactgtattttcacaaaagtgccacatgaaaaaaccaagacacactcttctggagctccacagggtcatgccagatgcatgatcgaatagagattgtggaaagtgtacattctggagggaagagcattccaacctcagagcagaaagtaagaccccaagctggtaggtcacagagcaaacttaggggatgcagccaagtggggacatctttggacagtcatgacctgaaggtgatgggctaaaaagaaaaatgtcaacaggatttaacatctctgccttcggagttttgatatggtagctatcatcaaaaagttccacaaaacaaagtgggaatacttcttctccaggattaaagaagttaagttttgtgtggaagcacccaaaattggcatagtgcaataacacataaacggtgactgtttctctccctaaacaaaaatggacagaagtgatatatcagatatatgtagagagagagtttaaataaaattttgttaactttagtactatttttgcatgctttagtgaacatacctcaagcatctgcacacttttatttcagaatgtcatgtggctttaatttcttagcaggatcttgaataatctttaggcttgagaacacaggaagtaatttataatgatatggcatttagatcatgttcatgcatttaagtgccttaattttattggtaaaatctgtcaatgaaagagtaatagttgctgcatatttagacttttcaagagatttccatcttttttacttgacacatcttatactttatataattttaaatattcacaaatctacaacaatcaagatcttattagtaataattaaaacacgatgtggtaaagggagctccctaagtaatttggggccccagttttctaaattaaagcatcttatggttcaaattttaaagaataaaatttccacccaggaaagtaatactgccaccgtggccaaagatatttttcttatctccacaaagcaattaattcagctgaaataagagaaaatgatctttagaaaacacccattttatcatgttactgaactaattataactgttcaggaattctcagtaattttcacaagactctgactgttgaccctcaagttctgccaaaattttttatacaggaaaaatagtggtagtaacctagtcattaatcttatctctctggatacttacttatctctctttatttcacttatttattatggtaaatatcaactcatttttcagatgagaaagcagttgagggatcactgaaagttaaaaatcgtcaacgatacagggaaaaataagatagaacatcttgatttctgtctcagcggattaaacaaaatgctccttttaagaagtgatctttccatataagacttgtgcttcagccacaacaggaagcctcgtttgggcactgaattgtactctacaaagtcctgggctgacccattagcacacattacttttgacattcaactaatgcaatgtcaatttaactaaacaagtaaacttgttctgatggacataaaaaacagaagcaaatggaaccataaaatacacttgatgtgacagtccttcctcatctaccgtcagggtactttatttagttgaataactggagttgactgggttatcacgcaattattttcttatttattccttttgagcccagcttaactgtggcagaagttcttccatttaacaaatgagtcttcatactagtttacatattactgtagacattggaattataataatgaattgggctaaatctctcctcaagaagtttaattcgaaaagaaatgtaggcaccaaattttattatcacgtggtagatgaattaacaaaagcagacacagggtgttttaagagaccagaagaaagcagcttatcttaggctaggaggtcaggaagggcttcagttcattcttaaaggtatgtgggattgattcaggaagaacaaagagaaaaattcagatgaggtaacatgagaatgtcatggcatgagagttgggagggggtaattataagtgggtttttttaaagcagaccataagctcaggtcaagaagtggtgggagatggaggcagagagatgattttatcttgttcctcggtacaactgaagatgtagtaattttatttagagtcttttcagttactctaacctgcctgggtttctcctaattcttttacattcttttctaattcctttaccagggtttgttataagctctccagtggtgcaggggtcttagtacaagagctttctggatcttttctccttttccacaatgtccttttcttgccagaggaatttggttttttgagcctagcccagcccaggagcctggctttattcagggaaagccttcctaatgctattacctaaatgtggccaaattgttcctatataactaactgttcctgcagtaattgacataattgttctctgcacccagccaggtgaaactccagcttttaatgataaatttgtggaaaaaaaaagttaaggtatatacacagatatttacgtcacacctcccacctttgccccacttctttttccactctgttggcagcctcagaaatttcagtgcaaagacagtcattgaaatgttattaattattatgaaaaattagaaatgagagaatggttgaatatattatagtaagttcatatttgtaaactcatgtttaaaaacttttaaatgaagttttctaatattgtacaaagatatgaaaacttcctacgatgtatatttaattgaatgaattgaattgaattaaatacatgtctttgctttaatttttaattttcaaaaatattgcaacacttgagaaagttacagggaataatctaatgaacactcagagaatctgaaggatgtggtccgtgttgagtctgtgacttggccaagaattttggaagcatcgccttagaatccaggactccttatttcaagcctaagtttgccttctacactgtttcctccctttccatgataaacgttttatcagactatctcttttccttacttctcttagagcagctagaggtagaagaggaaattgcttcaaattcaccctctggtcataaattatatctcccatattttatggcaggacaattgtttcaagttttcttctattcttaagccaaagttgcaatatgtttcagagatttaccagaatttagattttaatatagaataagtgaatatataagtaaatcaacatataaataatattttagatttttgtaaaatgtcactaggtctgtaatacagtgacatcaatcaaaataaaacaaaagtcagtttaagaatgttcttcattgtccccaccttcaaaaagcctgggtgtgctaatgtaattaattgaaattataggtttaataactgcagtgagttttttgccattcaacattgaagccaataacaatttaatttggctttacattgaagatcaacacattctttgaccattttcctaagaatagcttctttgggctatacattttggaaactaacaagtgatttttaggcctggaaattcactggtggatgagagagacacctcacagaaggtagctggagttgggatcttgatttcctttgaacggaggtggatagaagcatacaggctcagtgttctttatttaaagaaattgcttctgctggcagtgtccaatcttggcaccaattcaggtcactcttagctgggggccagttcattcctccctcagtacttcccctgttctaaaatcgtttcctcaaatgaccctgatcctcagcactcactgactctctgaagttgaggactggaagaaatgacaatcatccaaccaaagcgtctcaatgtatttctagttgagcctttaataaacatgcatgacatgccacttttctatcttaaaattctgctagggtaccctacccttgtcagaaaagtaagttcttctgaccactaacattcagaaatttttttctatctacatgtttttttttcctacctcatgtcagaaattctgatatgcatatctccctcccaaatggtatgctattattattaattgacagtcattgatttaatctaatcatccaactttacaggtaaaaagtttgtaatttccacaagattaaagaactcatgaaaggtacagagtgaaacctgagttttcttattcccaaactggaactctagaatagagccgtgttgagaattcaggcctcactgcttcctgttcagtttctccatgccattgcttcctgttcagtttctccatgttgtccttgaatattgcctccaacttttatatcctaaccaccccagaactgccatcccaccaccaagaccttacaatagtgactgcagaagccaatcaagtttctgtaatgagtttacagactaggacacagtaacagattgtgcaactcaccagtggttagatcctgtcatagtaagtatccatttactgaatacctttcatgttttaggccagtgcctggaaatatagatagaaatacaatacatagttcctggaaataaagacagatataaaagctagcagttaaaagtattatttgcaaaagatttcccaacctttgccattttttttttgtatgatgacacagaaagtaaagccattgttttcttcttctgtgttcctaatttctataacgtgggtgaaagcagcaacgtgtaataggttaaacagtaaactagttgttctagctaattctcagctttggcatgtctcctcattcataaaatgagagagttgaggcaattaatcacaaagatcctcatcaactgtaacattctatgatgttcttttatccaaattcttattgacttgatggaaatgcttgtcattttcctataatatgcccctgttaaccaatgggtcattataaaatgactcatgaaactagagatttgtttgtattgagggtcaatttataatacccacacatagtaaatttctcactataatgcaaaagacatgtagcatatgtatgaaataagtgatactagctatttctagaggtgactctaccctattctgacacttttaaagcacgtgtttccattatttagccaaagattaccagggaaatttctcatggtcaagcctattctacagataaagaaagtggtagatttctgtccaaagtcctaagagcccagctcacacatctccctgcctaataacatagcctcccattgcctccaaacaagccagctaacgatcactaaccaagatggtacatctagtgataactatggtctgtataataaaccagacttccttttcaaaataagcatttcgtctcatataaataaccttactaggattgaatgaaggcaaataaacttggcatccatttaaaatggaaaatatggtcaccaactgtgataggcaacctctatgatagccatcaatgatcccttgtacctcctagcatccatgcccatgtgtaatcccctctccttgagcgtaggctggacttctttactcacttctaatgaagggaatacagtacaagtgatgaattgtacttcagatattaggttacaaaaagaacgtggcttctgccacatcaaggcctgcgttctccctatctctgagtctctgtctctgtctctctttgtctttctgtatctctgtctctctctctctctatctgtgtgtgtgtgtgtgtgtgtgtgtgtctgtgtgtgtgtgtgtgtgtctgtgtgtatgtcagagggagggtcttggaatacctgttctgggagaagcaaactgtcattttgtgagtggcctattgagaggccagtgtgtcaaggagctgataactccagcaacagctaacaaggcctcccagcctgccaacagccatgtgagtgatcttggaagcagatcgtcccccactcgagccttccgatgactgcatccccagaaaggaccttgactgcagcatcttacagactccaagccagaggcaccctgctaagctgcacctggattcctgatcctgtgagataataaacttttttcttagctgctaatctgagggtaatttgttatgcagcaatacataactaaattccaacaaagtaattttgacaccccaagtgtactcagtcttctaatctaagggaaactcatagttcatgctctcatatttgctgtcattttttcagcaacgacagagctttatgaatggatcacagctgtcccaatgtaattctccaagaggaaaccctggcaccatctgccagcagggaatcagccagcccattgttaacgacaataacagaaattctatctaaagtattttcacttcctcacactcatgttcaagcagagcttctgaactttccttttggcaaacatgtctcctactgcatctttagtcaaacaattgcattttctagccctttgcctggggacattccttgctatgccagctgcccagtgctcttccaaagtcagtgcccactcaggggaaatgccacacgttttcatttcaggttcatgtggatacccatttgaatgcatacctgtgttttaaactttcttggcgtgaaataaatttaggcttttacatttgtcttgtaaaaggaggacggtctaagatattcgccttattcctttagtttgttcctggcttctaaagtggcatccacgtgcataaaaatgcaacttatttcatcatttgtcagcatttccaaaacagagaaataccactttccttgtaaaagttatatttaaatataataaaattatttttcaggaaggcaacaccacaaggactcaaaagagacaaatctatatgctcagagcatggtcactgaattagagctttggaagaattagaaaaaaaattgaaattttatcaggaggagaagtgtgcttttaactatctaaatagtctactagacataaaagtatatattgccgtatctaataagccattacactcaccaataagcattgatggtcatctgttcaggttgggtagacaggtaccaagtggtaaaagtgtttaagaagaagttcatgtgtgaaaatacgaacactgagggctcggactcagacaagtgggagaaacgacctacctgcactgaagatgtaaatttaatgatggagtgaaggatgactattttgcttattcatctaattttacctaacctggactgatgttaactcaatttttttttatattctgtatttcatgttatttaaataaaaatatcatgttttccattgtctgcaatctattggtctgaccaaaagtagagagcacattaaaaatatagcaggattaaactctatgagagcagaataatattattgctacttgagtggtaatctaatcataatggcagtaatggttcccaagaatccaaacaagacattacaggaaaaaatcaaggcccacctccataggcactgacttgttaatgcagctttcccagatgaggatatgtctgcatgttgtgatagagtcttaagagagaatcaggaacttatacaaataaaattgtatttgatgaacctaccatttctaaaattagaacaaatgtatttaaatcctccaatcactctccagaattatgatgatgagctataagagatcagtacatttttcttacccattttgccttctttgtcaatttgaggagtgatggtaggaaggtgtgtatggctaaagagaggcccacatggccatgccagccagggtggccttgagtgaatttagtgggaaaagaagttgtaaggtcataggtagatcataattccatttttcttattatcaatgctacgtattggatattacaaatttcttgagttaggaagattttatattcctccctcaaatacattttgattctaaataattagcttaaatcaagtcagcctgatagagagagtactgaattccgaatctggagaacagaggtttctgtctcagccctgttccttatggtaggccacactgtgtttctacacatcaacatgcaatgtgaaaggtaagaatcttaaatatttatttatgtatctcaaaaggttgatgtgaagattaatattgcaagtggaaaatcagaagctattgattatatgattatattattattacttctgctaagatatttgaaactgatcattttccataatgcaaagtaatgacacaatatcaccataaatgtttatgtgagacctaaatgagtaacaacagaactagggtgtgttgatgcctctagttcttactttttttcagagactcttaatttatttcaaattgtacaccagtctgatttatatccagacaagcccatttcagtttgggggctcaggaaggctctttgcaacaccccattctcacatgtaacttctactttttctcattgcctaataaaaatctcagtaatggctttcattccacagtgtgcactagatttaaaaaactattgccctccccacccctgccaggtaagataatgcaatgtcttcaatccactagaagttaggagtgactgattgctgctgcttggctgagagctttggtggtaggtggggaaagaacaagacaccaggagtctggagaatcacccatgtattagtctctcctcatactgctataaagaactgccagagagttggtaatttacacagaaaagatgtctaattgactcacagttccacatgtctggggaggcctcaggaaacttagaatcatggcagaagggaaagcaggcacatcttacatggtggcaggagagagaacatgtgaaggaggaactgccaaacacttataaaacaaccaggcctcatgagaaccatttgctattatgagaacagcatgggggtaatcacccccatgatccaatcacctcccaccaggtccttcccttgacatctggggattacaattcaagatgagacttgggtggggacacagagtgaaaccatatcaacccacatgtgaagagtgaggattcagtagggttaatgaaaaagttgtggttattttacccatgaatgtctcccttcagtaaaattagaatttgacagcagatcttctcttagaactgttaatatctttttattttaaggtctaagagagaaaaaaagacaaattccaaatatatcatgctatgggtttttggataaagcaagtttgattcaaaaggctaagtactaggagtccatttatgtagaattccagcaaatactgaaggaccataaaagcaaatattaacttcagagaactaaaataattagaatagtttatgtatacatatatgcacacatgtgctatattatatacatatgctacatatatacacatttgctccatatatacacagatatgctacatatatgtagcacatatgccacatgtatatgtatgtagcatatgtgtatatatacatatatacacatatgctttcaacattaatcttcatatcaaccttttgagatacatagacaattatttaagtttttttttttttttttgaaacggagtctcaatctgccgcccagtctgtagtgcagtggcgtgatctcggctcacttcaagctccgcctcccgggttcacgccattctcctgcctcagcctcccaagtagatgggactacaggtgcttgccaccatgctcggctaattttttgtatttttagtacagatggggtttcaccatgttagccaggatggtctcgatctcctgacctcgtgatacactcgcctcggcctctcaaaggacaaatatttaagatttttaccattcacattgcatgttggtgtttatatatatgtagcatatgtgtatatatgtagcatatgtatatttatacatctatatatacatatatataaatatatatttaaattggatcagcagttaagagtccagattccaggagatcagatgttcagtctgcccttgtaagcgcagtccaattggatgctagtgtgtaagataaaccatcttctttgccctgcatagggccccagaagtttattgtagtggaaaggacactggggacatgagataaatcctctcactaatagaggcaaacatttgtaagtaagattgcaactaatcttctctcgctccagccttgcatgatggaaaactttgagtgaagatatgaacaaaaacaatgggttgcgttaatccttttcaacctgggaaaaggcatccacacctgtcaatttggggtggttgcccaggagggaactgtgggaatacagccatgggagaattagagctgagttgccaggcaggccagataattccttctttaacagcttgaagcccgggagtcacatttcctacttacaaaaagctttccaggacgtaaccaaatctgcggtttcccaggaggtcttggcttgtctcaccaacagcccatgtccttggaagacacaagcttttgttgttttgggggaaatttgggttgtgagtgtgctcaacacacccctggcagagcctggatgagagaaagaggctcatctttcaagtcctctgccactccctttgaaacagggctgtttttaaagggcctcgagacttacttcctggctgcgacttcaaagcacagatgaatgcttgatttagagctccggggcctccatgtctattattattattgtaaaatacgaacaagtcagccacgtgtttataaacgtcccatgacagcaaactcactggctagaggatgcaacattaggctgtgtctgcaccagaggtagggaggctttgccaaggggggcaagcccaagtaaggttcgttaaatgccatgaaaaaaaaatgcttctggagcacaaggcgcaggagcatttcctcatttttggtgagcattgtgttcgtttattaagaaatggtcactgacagcaatactgtctgccatgttcacatattctgagaatgcagaacaaacttgtgactcagagggctgagagaaagctgtaaggagttggggaagggagctcaacattactgttataattgaactaagggctcaggcctttatcagcccaccaggctatcagacggcggggtaatgtgactgtaagtctttgcctacgaatgagttcagtgcatttcctgaaagtaagtgaaaattgaatttattggtttactttctgttttcttggcaggtgagatagaacaggtataaactcatattagtataaactaatgagcaaaaaaataaaaaagaaaagaaagaaacagcaatcaaaagcaacagaacacaaagtaaagaaaaagataaatacagaaaaaaatgaacaaaggggtgtcttggttcaggttccttagaagcagggcttaaaacaagaactcaggtgtgcatgatatattgagggaggactcgtagaagaagagaagagagaaacaggaagaggtaggggtgtagactgagatggaatctagccttagcctgatgcagtggtaagctctggagcatgacctgaacaagagttggtgttaatttgaggcaagaagactgtcctttcatacttcagtgttagttgagcttcctggatgggggttaagggagaatagccctcaggctgatggctcttgctgaaagcagttctctgaggagggagcggctgtgagccattagcagcccacttacagcagcaaggcagatgggtctgcaagccagcaaagaatatctacaagacaccaacagtatccactccaggggcctattggagtgatagccagaaatcatcctccttgccaagaaccactctgcatctctcactccttcattatctacgtgtgggatagattaatgtggcctaaagcaatgggctctgaaacattggtcccttggaaggtttggaattgcatttaaaaattcccatcccctatatcctagtaaattctacgtttaaatcgatgtcaccagagaagatcttccacatgtgaacaagaagacaggcccaaggatgcttgttgaagcattatttgcaatgatgaaataagataacattctgaaggttcaccaatggggcaacaggaaatgaattgtgatgtgtcattccctagatcactgtgtaccagataagtgaactcactgatacatatagaaaacctgaagttgaatgaaaaaagcaagatgcagtgcaatgaaaataatatggtatatgtagataacatttttaaatataggcacaaaatattgttatgctttcatctcatacacacatacataaatgtgttatatataatacatatttatttgtcaaaatattttttaaagtttaaaagaaaatatagcagactcatcaaggaggtgagaatgaaaatggaatttgggatgaggtcaaagcgttttcaactatatctataatattgcatttttctaaaaaaaaaatttttaaattttaagtaattaagcccctaagtaattaagcatgcaaggtaaggtactactaggaagtatgcatgtgaggaaccaatgggccagggtgttttagccctgaccttgtacacatccagtctggcttcatagacacatgttgcagaatggcaaggaaatagttgggatagcaaagggttcagcaagaggtcaaatgggacaagggaaataaagagcaagatgaagactctgaagaggaatcccctactttcatagatatttctagaaccattgttggccccagtgacacagtttaccaatcttcagttatagcaatgctgttccctatgcatatgtaccttaatcttacagatcatttgtttcaggcattttttacttgattagtttccaatacattgtttagatttctttagattcggagagaaggcccaaaacataaaacaatttataattagaagtctgaagctataaaagtcacctaacatttgtgcatactattttcaaagatgtggaattgtgttacatacttaaaacagcatccttctaagtgtattacaatgatctgctttactcaaagtctactgatctctcaaagactccttgatctctcaatatgttttattttatataattcaaagagaaaacaaaggaggatcccttggttacgtatcttctggaaatattgggttacagctaatcatctttctgtattgtctgacttctccaaatctttaatattccacagtgggctgtgaatgcacaagtgtgaaacatagtatgcaatatttccctaacctatttgcacagagaattatttgttattggggctttcctccccacaccagactttagaaaatacagacctagaatttaaccagtagatcaaatgaaactttagttttatgtttaaaacaaagttgaaaaacacgcttctctaatcacatgagtgtttttctctttggattgagactcctctgcccaaatttgtatatagcttagtgtgtataacaggggaggggagggatttcaactactccttggagctgtcaagtactgaatcccactgattagcaaggagtttctctcaacgtctgaacagcttcttgccctggagtaatatgtcgctgagtcatagggaaacattgcttggtaataattgatgtacagctaaatcttctaagcactttttaactatacaaatgcttcttgcccccacgaacaatgaacaagagaagaggcttccttttaactttaaattaactagcatttcaaagagttccagaacatctttcaaactcacttctctgaggacatctaaataggaccagtgactccctgaaggcaccttctaccccagagctctgtttcctttagatactgaagtacaataaagttgctttatagtcatagaggaaataaacaggctgctgttctcaaagaatgcgaagcccttacctgtgccttgaagataggaacgtttatgagtcccaggggacagggacagcccccggatgtgagtagtttccagagaaacaagttgatctgaagtttttcctggagagttggaaaatctgccacatgtcatccagcgcttatttctttggtgggttttacacttgggtgtcattcagcagttttatgagagcaagacaatggatagagaagccataaaaaaaattcttctagttctttaaggtatgagtcatctttaccattgaaacctttggtcacagcctgaatagaagaggcaacatgcactgctttttttttttttttttttttttttggtaggggtggagggagaagagttttcaaatgtgttgcttccattcaggagggaaagattatttagggatctattgatttttcatatgtggtttgattgcattttccctcacttgagtttctggatgtgctcatagattgaacctcagttatgtgggaactttcagtgtcagtttctaagagtaagaggcacggcagcattaatttgaccttctccatgataagggatccattttagaaacagtaataatagctcacacttgttgaacacttatttgttgtcaggacctgatataaatgtttcatatgtctttacttatttaatgtgcatagcagctacaatgcagtagttgtggtagattgtgcaaaagtggctgcaattctccaaccttccctgtatctgcatccctttgcaatgtaactgcaactccttgcatcaagagatgaagtcaatatcctcaccttctaaatctgggctaactccctcgtggctctgtgattagaggtgctggctgaccttgggtggccccagatggatggctcctctggcttcctccacatggtctcttatccttcagctaactagcccaggcttgctcacctggctgatggacagggtctaagagaagaaagacaagggcaaggcctttttgaggtctaggttcggaaatgccacaacaatacttctcctacatgctgtcagacaaagaaagtcatagtggccaacccagatttgaggggtaaacaataatctacctattgatgggagttgccacaaagtcacactacaaagggcctgaatacaggaagagccattttcccccatgggtttcaaatgaccatgagaatccacattgccatcatctagaacagtaaaaagtgaactaatgattaatacattcaaacatcagctcttcattaagttgcttctgaagtggatactgcacaatcttgtaaatgattattcatggtcttttcacataagtcacccaatagtttgacattgtctttcaattttctcctttatatcattagttcctttacttttaaggcagacttggacaaaattcattgtttattatataataagtatagtgagtataccactccaaagaggactggacaaagcaagaagacaaaaacctgatgcagtgcttttcaacaagaaggtacatattagaattacctggggaatgttctcaaacttctttccctacctccattctgaggcatatgtttatttccagggcaaggaagatgaagacaagcacttgtgttcaaacaagcccttggataactctaatacgcatttccttcacttctcctcctcagttaagaatgtctgcctaacaatttgatggagttgtttgaatacctttgataaggtgaaattattgtggcagtataattagaacaatgtgttttcatacaagctcttctatgttatagctaagaaaccttgagaaagtcactggtcttctgggagcctcagtttcttcatctctaaaatggggatcataataacttgcccatctcagaggctcaaatgagataattaggagaaaaaaagtgctttgcaaactgtaaaactctaaaaaactgaaaggaatagaaacgtttagtaacttcccttaattatgccaaagccctgcaagttagtctagagtattctgtatgaaatattctaaaagtgaatcctgccatttcctgacaggcgtcagtcatttatctttcccatgatctctctgaatgagactttccaaatctagttaattcctatcttttaatatacaccactgtagtgttggaatgctgccggagatttggaaacgggctcagagatgaagttaagaggtcattttgctgttactgtgcacttaccacaaaaatgtggctttgtggttattcgacaaaaaggtgtaataattacttgcagtgactgtatagaggcatgtttgaaaaacagaattttagaggaaggaaagtcaataacttacatgtgtgctgtgaggagggaaatagaactagaaatagtttggagacggttgcttttcatagaggagtaggatcagacagatggggggcaagttgaagagtaagctccctgaaggttaacagcttctcagttttgtggacacacacacacacacacatctgaaatttgatccagattataatatatgtgaaaagcaagttgtgagacagtgtatatccttagatttcacaagccataggtagaagaggccaccactgtgttggaacccaatattctttctcagcggtgggagcaggaccaccatgtgtaccattctatgggagccatctacaccacaggctgagtgtcagccttgggtgggagagacacttatgtgtacatcatttacacaaaacgatggataattgccacatttcaagttacctattccatttgaagttgtgaaaggtaaatgttttcacttctaagaaaactttgcccttttctctcatttcagagggaacaacacagagactcagaaaggataatccactgtctctggtcccacagcagttgaacccaggtagataatcagatctgaattgttctgttttttttgtcaacatgtttcagaaagttatggtagccaccaactgagctatttcctaatccccttctgctagaagtgcccctatgtttgctcattacggtgttgacggttatttcacttctatacttagggggccttcggggattctaccggcgacttctcagaagccgtatttatgcactacccagaaggaaaggcctgcagtgtctaaaatagttataaaatgtctgtgagatttgagtggggtctgcttttttctcctttcttttcttttttactccctctgccttgtttcattttatgaccactcactggtaaactgacgctggaacagcaggttgaaatgcctttcaagcgctttgattgccaccatgaaaacaaactgctttttggccttgtgtagacacgatgtctgagaattattatagtcagtctttgctcatgattccatgaaactctccaattctgcagcaagccccatattgcagcttttccaattcacagcccagcatacatgcaagattccttggagtatctttaagattttgggttctataaaacagctcccgctcataaaagcacacacaaacttaccattgttgagtgttttttaaatagaatcaggaacgaatctgtgaccttgtggccctgaggtgggaacactatctataaagttgcccagacattctgcctgtcagtaggacattttcattgaacataagtataaaaaaagaaggagccagaataggccaaaattttttacatgccacagctcactttatgcattttaaaccttgttaacatttgctaacaagaaagttaagaactttgagctataaaaataggaatgtcttgctaactaaataaatatatgtgtgaactttgggttctgctccttgctctggaccggctcatgatcatgcaaaaggaaaaagaaaaaattaaaaggagcctagtttgggcttgtaaaatctctaacaagtccttagagttttcttccttgcatgtttctcagagtttctgttgattgcatcttttagcagaattgaaattcacatgagtcattcagttgctgatcatcagtagaattgtgaagattctgaagtgtttagatttaccttttaaatattagcaagatcacactaagaatgtagaaacaacagagagaactaagtactgactggatggaagctttaacttttggaagcagagttgcctggggcatccttctccattgtcactgttcatcaatttccatctgtgtgtattttctggggacttgtaaaccatttcctcttttcagtttcctgtttcccactctagtcgtcttcacttccttgtggtaaacagcttccttgctgggcagtaaacagcattattgctttctttagattacatcaattcatgggctttccctgagaaactgaagttgcttgagagtcctctctctctgtctctgtcttcatctaatatggaagctcaaagaaatatttaaaaaaaactattgaaggtaataagctagaggataaaaaatgaaaataaagttacagtgaaacccaagacaatttaggtggatgcatctttggtagaaaattcctgtggtggctatgaattgattcactaataaaatttaatttttttcagtgtaaagtatgtctctaagacctcacttctctgagctgggaaaacagttcaagccatagcagtgtcagagttctgggagcttaagcagtgcaaaagcctttaattcacagactcttctatatactttatgtagacaaagcagttgacgcttatcgttctagaaggtaggtactattatgtctattccacagatgagaagacagactcagagatgtcaaaactgacctccccaaggacaaacagataataaatatctgagctaatatttgaacccaggccttaggctccagagtccttgttttaaggcctcctcaggcactgtgagagagatggggggctgtctggtcttcattcatcagcccacacaggatgtgtctcagcagcccaccttctaagcttctgtaattcccctggccagtgtctctgctgtttctacggtatgcttggggttccatcaaccctttgtgaggcagcctacaattcctccttagacacactctatggttgcttttctctctgcggatctgccacctccccacactgccgcctattgcatttcacacacaatctcatctctgcctccatctcctccttctcaagccaggatggaagtggttcctaggtgaggtccttcttcagcactcacttgtgctttatgctcatgaatcctctcaccttccaggcctttggaaatataatccagcctccctcaaaggcgcttgctggttttcatctgactttcttatgaagagactttcttgcagcaatgcaggagtagaaagaagtagatgggggtctgatgtttgcattccagcttctagtactttcctcacatagatatcctgactttgtggttccacagtctaccaccagtgactcctaccctcgatatgtcatctccagtgacgattttgtctaatgatgggccagaccagagatttactatcttagagcattgctcagccctcatttgctttgccagcctggggtctagagggttgccacttagcaaccaagccccatttcctgaatttgtcaccagagttaaagggttcccgcacatttttgaggcagtaggtggctgcctccctctactccatgaagcttcctgaatacagagaggcttagagagttatgaagacttttaaaacctgggaatagtctcaggcagcaatgcctgaatcccagggaagagctgtgtggctctgagatctgagcacaagttccctagaagtagatccagagaagggaatttgggtgtatatgattccctgagggaagtctctcagaggaaagggagagagaaagaagcagaggaatggaaggagctaggcagcaatgtgatctcagctgaagtccagcctcagcctgatcacatgggaggctctgggccatggattgtaccaagtctgtctcatattgagacaaggtgctggcctcaacttcccctcatcattagctataggatgccccaggttatggaataaacttctgggaaagttggcacttttgatcaagaaccatccttcaggtaaggatggggacaagcatgagcaattcaacacccacagtgactggaggaaccacgtacactgatttggcaaagaggattacatgtacaccaagagtattcactacacaattcaaaagaccagagccatcctttcacatgagaggtcttttccagagaggagcttttgttggattgactttatttctaggaagctctaactctggttctgacaagcctgagtattgtgactttttggtcctagagtgcccatattccatattggagtacttagagaaagttatgcagtctcagtatcttccacagagtagatatttaatatgtagatatttaactaaaatactagaatggagaataaaataaattagtatcctatgactctaccaacattttcacttgaatttggatagaaagggaagaaatataacatatttactattatttatgactcttgatttttaatcttatttttaaaaagagatcacagaacttcagagcaggcagaaaccttagtgtcatctagtctaaccctctcattttacaggtaaggaaaccaggaccccaggaagtcaaggtcttatggattgtggttttgtgtgtcttcctttctctgtgatggtaaccatactaatgactaggccaaagggctttgtttggttcacttacatggatttgaaagagcccctgcatctggaaggcctatcggatgggaaccaatttccctggggtggtagcaacttaactaaataacttgctatgatcaaagcatcttcgggagccattagctctatacagcaacatgctgttgaaatctgcaaaagagttggatcaaatcggtggaagattcttaatggctccccaagtccctatgtcagattctacttttataaaactcaccttggccatggcctcatcattctcatgtgtaaaatgaagccacagctgcccaccctctcagaatgtcatggtggttctgaggttcccatgagcatcataaatatatagccctgtaaatctaagaataataatcatgattgactcagtatctccaatttacttattggtaaatacattgagaacagttgagagaattctccaggtttataatgtggaatgaggcataacctctaatataaaccaggtctcttcaccccttgccttttaaattaagcaaagtttcctaaaatgtaagataaaagggcaaaattatatatagtcatcatttacacaagccttaaatttattgtgttcctagttctgtgcattcactttgagaaactccacaggaataaattccaacaaagttaacagcagatacatctactttgtttattccagaaactggaaaatatttttttatcattcctaccaggactagaatattattctatcttagagtcaaatgctagatggcttcaggactaaaggtaagctccaagcttcagcccaaataacaccataccaggctaggctggaagatgcaccaagcccacgttcccagcagacattatatgaatccctgccatgtcatttatatctagtcattgcagacttggccagctactcccaacccaaaagtcacatttatatttggtcatttcttcaagaaaaaaaaaataaaggctaaactgcaccttgccttctcacagtaagtcacaatcattaacttggtgtattattgaagtgacttatttatattactcaatataagatgtactttaaaaaatatatgtggaatgaatggatgaatgaatgagtgttttagagaagagacactgtatgtgataacagctgattataagttgaaggaatctgctaagcattaaatcattgtccagtgcaggcctaaactcatggccgtgaggacagttgtttttgaaaatattggagtaaatctttgttatttacaaatattatgtctccaaggtttgaatctgataacttgcttctgctggggaataaatagaaggtatttactcaacacatctttaaaaagattatttgtataaatttatgaggttcaggtgtaattttgttgcctagtggtgaaatcagggcttttagagtattcatcactggattaacatagatagtgcccattaaataatttatcatcttccactcccttcccactcaccacctttctaagtattcaatgtctatcattccatactctacaatcatgtgtacacattatttagcttcctcttacaatttttcaatggtattcttttgtgtctgaattgtttcatttaaaataatagcctccagttccatccgcattgctgcaaaatacattatttcattcttgttatggctgaatagtgttctattgtgtatataaaccacatcttctttatccagtcatccattgatgaacacttaggttgattctgtatctgtgctattgtgaatagtgttgaaataaacttacaaatgcaggtatgcttgatatcataatttcttttcctttgcgtagatacccagtagtgggattgctgaatcaaatagtagttctatttttagtcttttgaaaaatattcataatgttttccataaaggttgtataatttacttttcaaccaatgatgtataaatattcctttttctctgcaccttcaccaatatctgttatattttttgtctttttaattatagccatcttgattggtataagatgatatctgaatgtggttttaacttgcatttctctgataagttagtgatgatgagcattgttttcatatgtttgctggccattggtatgtcttcttttaaaaaatgtctattcatgtcacttgcccactctttaatgagattatttgtcattttgttatgttgttaaattgtttgagttccttctaaattgtggatattaattccctgtcagatgtatagtttgcaaatattttcctgtattctgcaggttgtctgtttactctatcagttatttcttttgctgtgtaaaagctttttgagtttaattaacacccatttgtctctttttggttttgttgtctgagccattaagatcttagtcataaattctttgcctagaccaatatctggaagagttttcctaggttttcttctaaaaattttatagttttatatcttacgtttaagtctttaattcatcttgagttgatttttttatatagtgagaaataagagtccagtttcattcttctgcctttggcaatccaattttcccgtcaccttttattggaaagagagtttttccccagagtatgttcttgtcaattttgtcaaagatcagttggctgtaattgtgtggctttatttctgggttatctattctgtttcagtgatctatgtttctgtttttataccactatcatgctgttttgattactacagccttgtagtataatatgaagtcagggaatgtcatgcctccagctttgttctttttgctcaggagggctttgactattcaggctctcctttggttccatatgaattttagaatatttttttaaatttatacaaaaatgacattggtattttgatagaaattgcattgaatctctaaattgctttgggcaccatggtcattttaatgatactaattattctaacctatgagcatgagatgttttctcattttttgtgtcatctatattttctttcaacagtgttttgtaggtttttgtaattgtaaatatctctcactcctgggttaaatatattcctattattttattattatttgtacctattttaaatggggttaccttcttgtttttgttatcagctacatgactattggtgtacagaaaggctattgagttttgtacattgattttgtatcctgaaactttactgaattcatttagcaaatctaagttttttggtggaatcttcagggttttctagatataagatcacatcatcggtgagtagaagtaatctgacttttcttttccaattgggatgccttttatttactttatcttgcctgattgctctgactaggacttccagtactatgtggaataggagaggtgaaagtgggcattcttgtattgtttctgtttttagagggaacacaattaacttttccccattcaacatgttagttatgagtttgttatacgtggcctttaatattttgaaatatgttccttctgtgcctagtttgttgcaggtttttaccataaactggtgctgaattttatcagatgctttttctgcatttattgagataatcatatggtttttgtctttaattctgtttatgtgatgtgtcacatttatagatttgtgtatgctgaaccattcttgcatctctggtataaaaaccatttcattgtggcatattatcattttgaggtgctgttggattcaatttgctagtattttgttgaggatttttgcatctatgttcatcagaaatattggtctgtagctttcttttttgtggtgtttttgtctggctgtggtgtcagagtgatactgatctcatagaatgagttagagacaatttcttctcatcaattttttagaacagttttcgcaaacttggtattagtttttcattctatgtttggtagaatttggctgtgaattcaactggtcctgggcttttgtttgaggtgtaggtatttcttattactgattcaatcttgctgcttattattagtctccagcatttctatttctttctggttcaattttgggagattgtttgctttcagcaatttatccatttcctctaggttttctagtgtgagagtatatcgttcataatagtctctgataatcttttgtatttctgcagcatcaactgtaatgtctcctttattatttctacttttatttatttggatcttctctcttcttttcttggttagtctagctagcagtttatcaatttaatttgtgttttcaaataatcaacatttgcttcattgatcctttgtatttttttttttttttttttttttttttgcctctagttatctcctctctgatctttgttatgtcttctgcttcctttgggtttggtttgtccttcgttttctagttctttgaggtgtgatgttaggttgttaatttgtgagctttctacttttttattgtaggcatttaatgctacaaacttcctgttagcactgcttttactatatcccagaggttttgctatgttgtgtttccattttcattcgtttccaaattgtttttagtttccatcttaattttttcatcagtaagatcattctgaagcatgttaattcccatgtatttgtatagttttggaagttcctcttggtattgttttgtagttttactctgctctgatctgagaagattctcgatatgatttcaatttttgaaaatttgttgaggcttatttagtggcctcacatatggtctgtctcaaagaatgtgttatatgctgagaagaatgtatattctgcagctcttgagacaaatgttctgtaaatgtctgataggtccatttggtctaaagtacaaattaagtccagtgtttttttgttgattttctgtctcgaagatctgtctactgctgtaagtggggtattgaagtcccccactattattgttttgtactctctgtctttctttatgtctaatattcgttttattaatctgggtgctttggtgttgggtgcatatatatttggattgttatatcctcttgctgacattatccctttatcattacattatgatcttcatttttctaactacttttaattgaaaatttgctttatctaatataagtatagttactcttgctcactttcgggtttccatttgcaagacatatctttttctatccctttacttttagtctatacgcctttacaggtaaggtaagtttcttataagtagtatatagttgaatcattttttatccattcctccaatccatatcctttaggtgaagtatttaatctatttatagtcaaggttaatattgatatataaggttttgttcctgtcatgttgttaattgttgtctagtggttttagacattctttatttttctgtttgtctttgtggtttggtggaattctgccatgttgtcatttgattcctttctctttcttctttgtgtgattgttttataggacctctgagttttatgcttttgtgtgtttctatgatggtaaatatcatgctttcatttccatgtttaggactcctttgaacatttcttgtagggccagtccagtggtaacaaatttcctcaatattctcctgtctgggaaagactttatttattttgcattaatcttaatatagctggacagaaaatttttggctggctattttttgttttgttttgttttaattttagtactttgcaaatactatcccattctcttctggctggtaaggttcctgctgagaagtccactgttagtctgatggtgtttcctttccagtgactagatgcttttctcttgctgattttaaaattctctttcaaactgactttacacaatatgatgacaacatttcaggctgagtttctttttgcaatgtatttgctgggagatcattgggctttccgtctttgaatgtctaaatgtcttgctagagttgggaagtttttgtcaattattctcttagataagttttctaaacttatcggttttccttccccctcaggaataccagtaattcattagtttagttgctttatatagttccatatgtctcataggctctaagccttgttcattcctttttgcctttttttttaatttttaattttttatttttttggtctggattatttcaaaagacttgtcttcaagttctgagattctgtcttctgcttgatctagtctattgttggggcttttgattttattctgtaattccttcaatgaacttttcagttccagaatttcttttttttttttttaagatatctatcaacttggtaaatttcttgtgcttatcctgaattaattttctgattcacgtgaattggtttcagatttctcttgcgtctccttgatgttccttacaatcaatatttttaattatctggcattttaaagatttctttttggttagggcctattggtagagaattattatgatcatttgaagatgatgttaccttttattcatcttttctatacctttacgctgctttattcacatcttgagtaatagtcactttttctcattttttaatttgcttttataaatgtgaagggggatcttttttcacttgaagatataactatgatgtatgctaggtaaggccatttggctttgtttctgggtatattcagtggcaaagactctatatggtttccttggctgtaaatagcctagtgtggtgctttatcaaatggcaggtatagtagcagtgtgccaagtgtgtgagcaggctcacaacctcctgagcagccagaaaggcaatggtgatagggatagcagcgatcactagaagcttttctcattccagagtactgtgctattgtgtcagcagttataacgggctgtgtggactgatatccaggacaggacagtaggtggcactttcaggtaagaaccagctgtggtggtggcagcaggtttcatgcctactctctgttggccaggaaaggtacccaggtgtcccaggtggtgagctgggttgtggaatgcccaggggcctgggtcccacactccattttagagtgcttgtgggtggagtggtgggtgtgaagctgggcagaaatggactatggaagactacattcaggcctcccaaggatagctgcaagcaccatctatgacacaggtggcaggacagtcctcgggctcttagcaaaatgcttgggtgagggataactgcagctgcaccaaggtctcagcatgggagagaggggcagtcccagtgacagagcattggccagtgggaatgaattctattctctctcacactccagacctggttgagctttctcactcatcccaactgtggcaggcacttgggatagccaggtagtcactgcaatttgcttctagtctgccataagccctggtcttagaagtcactgcccaggtcaatattatacctccccaacaactctcctcctggtcttgtcccaggggttgggggagcccgattctgatgccagtggcaggtccccacgttatactcttatttcacttctggctatgggagctcctctcctgtctgagctccagttcttcatgccccagactaagtctctctaatgccagagacttatgctgctgcaagctctgaggaccctacacagcttactaagagctaggatcaagaatgaagttctactcttggtgcccaggcatgatggcattcatgggacatttcccagaacagttccttctcacagtctcccagacactccccaagctagtttcaatgcttaggagagtcaagctgctctcttatggcctggattgcacaattctccagtgggaaagtgaaccacaaagagacactcactcaccgtctcccatattgaggattcacatccagtcttcagtcaatcccaaccatgtgggctacatgcccttctctttcacagactccagattttcactttacttttctgtttaactctcatgttctttcttggattaatgttcaaagtgtgattgtttacacattttgactcttctaagtggatgaggcacactggaaaagcctctagtcatgcatcttggaaaaaaacagtacatcttaacagaagccaacattattctatttcctcagccaaactctgattcaatgcaacatgcttaagtcaagtgtgaatttgaaatagagattagatatttctgttttctacttttttcttagtgttgaaaaacaggatgtaattgtttgccaaatcctcttgatttacccgattctgattaagaccttgagattagatgcaaacagaatgtcattcaatgaaatcagactctttagagtttgttggttgttttagtctctgctacattgactgtaaaactggtcccaattctccaccccaccctgaatccatgcccttggcaatgtgactgcagctacttccaatgtcaacacctataaacaggtgaactctatttctcctatcctggaatcttggctggcctcatgacttgctctagccaatagaaagtggcagaatagatagtgtgacacctctgagctaaacctactgaggccatgcatgttttgatttttcaaagaactctctccacctcatgaacaagcctaagctaacctgctggagggtgaaagaccatgtagaggggagcctcgttgcctcagtctaagactatccttgaccagtctacagacagttgtatcccaaatatatcagacagttcattcaagttcagctgagctgcctgcttcatcttcagctgatcacaaatatatcaatgaactcagtaaagaccagaagaacctcccagccaacattgtaagcaataatatgtgcttattgatttttaagacattaggttttgcttttttaaaaaaacatggatcaatagttactgatattgtttatatgtatagatagtataaatgaggcagggaatgcaaaactggctcattgtatgagggaagttcttgatggcatttgctttggatactggagatctaacctaagaatgaggtaggtattttactgcagaaaagactcaggggatacctgatagctgaaagatgcataaactgttctatgcagccataaagtatgaaactgataccaacaccagaaagttcaaggaagacagatacataaaacttcctataagcccaagctatacagagatgggctaggctgcctaggaatatgtagagctcttgtctttaggggagacacctgaagggtaagcacttcaagggggatgtaattactgtggaatgtgttaatcactatttctaattggtaaaaacatccagctaagtgataaaaacatttcttgcttaagcaaagaagacctaagatagagctcactctcttcctcaccctcaccctctctacccacgccctctccctcctttatttctcagaccttatcttttttcagtattggctaattctcaggcaaggtgtcttcacacatgatggccctagattcccaaatttatattttactttataaattctcatagaagtacaatttttatcaaataattttcaaaaacaaatcctagaattgactccacatcatcccaaactacatcacataaccacccctgaaccccaaatgccccacttccatgttggagccaaggttatgttcctgcctccagagataattgagttgcagaagtcagcctcatctgaactacatggaataagaatggagtgaggtgcttctctaaactaaatatgagagctattatcagaaaaaaaaggatgagttcttgccaaacaaaaagagaatgtagtctctactaaagtgcaattcgacttcctaatatgttattctggcttttcttcacagaaagaacaaggtcagcctaaaagacataaattcaagaatgcagggaaataaacttgtcttcttgaggcaattcagttcaatgcagtttaattcaacaaatattcatcgagtgcttagtatgtggtaggcactcttgcaggtgatttggctctgtcagccagccagcccccaggtagctctttacctccagccagggcactacccaaaaaggctgtaacaggtatgcagaatttccttttttaccttcctacttgtttgtcttctctccctcatgtcttcttttcttttttgattttgatctcaggggtagatggttgagttgatcatattcttaatttcctggcatattaacatcacgaccccatatctcttattttttaattatttgttatattgataatcccccttctccatcctcatccttttcactcccataggcaacacaagtgtcttaaataaatagctttttgtttgtatatgtttctataataactattacaataagtgtatttttatatgttgcatttcttaatttttataaattatgtaacattttcatgtaatatgcttatatatatttgctaattatattttctgttacatatataactgtgcatgtatttatttctatatcttaacatacaaatagtttagttttctactgccccttcctgttctagattttaaatccacccatgtctctttgttgtcatctagaacagtttcttttaaatgttgcaggtgaaatttttttacctcataattgtttaaggagccataaaatgtaagtgtcctttaaagaagggactcactgttgtatgtaaatgacaggcactggccctgaaagaagtctgggactacaggcgccggccacgaggccagctaattttttgtatttttagtagagagggggtttcaccatgttagccaggacggtgatcctcccgcctgacctcgtgatccacccgcctccgcctcccaaagtgctgggattacaggcgtgagccaccacgcccagccaagtgtctttgtttttatgaagctttgatataggacttaagaagaaattacttacgcagagagtgagggtactggagtccttggtaaggttttctttcttagtgaaaagcagccccaaatcagtttcctttctaacaaagagcagcctgtaaaatcaagcggcagacatagatgccagcagttgtgccaatcatgttcaaaatggctactctatcttcccttttctttgtcagccacatgtccagtaaggagcagacaagatggcctcagccaaggggaaagcctatctgcataataagattagtgtgtgtggctagccttccccatgtgctatgtaaacgtcacacctattccaacccatctgtgggccctatgtaaatcccacaatgcctcttcaagcctgcttataaaatttggtggactccggccaggtgcggtggctcaggcctgtaataccagcactttgggaggcccaggtgggcggattgtctgaggtcaggagttcaagaccagcctggccaacaaggtgaaaccttgtctctactaaaaatataaaaattagccaggtgtggtggcaggcgcctgtaatcccagctacttgggaggctgaggcaggagaattgcttgaacccagcaggttcactagagagaagggctttcttctattaaacctccactcctaaactcctcgtgtgtttctgtgtcctaaattttcttgatgtgagatgatgaaccccgggtatttaccccagacaatatagtcatttcagcttcattctagttgaggaagaggaactataaataagtggaattgtgtgcaatagtttcaaaaagtgctaagtgtaataaagcaaatagaagagggtaatgaaataaagagttactgtggtaggggaggcaaaaaaaaatggctaaatagaaccctctaacaatcatccccactccccacaagaacactaaattgaacaactacccacacaagaaggcacattcataagaaacaaaatcaaatgagtaatcacagtttgtggtttaacattatatccaggaaagggtccctgaagagggaaagaaagacagtcttgaaatgccaacactacccctccccagtctcctggcagcagtcacatggtgctgaggagagagatttgtgtgactgggggagggagagcacagtgattgtgggactcagtactgccctgtcatagcagaaagcaacacagaccagaaattggccagtacccacagagggagcatttagaccagccctagctggaggcaaattgcccatccctgtggtcagaacctaagttctggcaagccccaccatcatgggctaaaaggttctggggttctaaatatacttgaaaggcagtctaggccacaaggatttcaatgcctagacaaaccctagtgttgtgctgtgctcagagccagtggacttggggtacaagtgacctactgcaataccacctggggcagccaacagtgggcttacatcaacaccccctagtgccaggtggtgcaacatgaggagaggagagcagtgagtgaagaggattttgtcttacaactaggatatcaccacaactacagtggaatagagcaccaggtagagtcctgatgcctgaaatggaggtaggacctccatttcaggtcctagctcccagaccacatttctggacacgccctgtgccagaaaggaaccccctgccttgaatggaaagaccctggaaggattaatcgcctactgattaaagagactgtggcccttaaataagcatcggcagcacccaggcagtactcaccatggaacttaggtgagacccagggccatgctgacttccagtataacccagggcattcccagctgtggtggccataggaaaagactccttctccttgaggaagagagagggaagagtagaggtgactttgtcttgcagcttgggtatcaacttggccacggtgaggtagaacaccaagagggctcctgggccccctaattccaggccttggctcctggatggcagttttggaccttccctgggccatagcagagcccactgccctgaagggagagtttcaggcctggcaacattcaccacagctgattgaagagccttggtccttgagtgaacattagcagtagctaggcagtacttgctgtgggccaggggcaatggtgttcaaggagagaggtttcttctgcttgagtaaaggagaagaaagagtaataagaactttgtcttgcatcttgggtgccagctcagctgcaatagaatagagcgtgaagtagaatcctaaggttcccaactccaggccctggctcccagatggcatttctggacctgctctgggccactgctctaaagggaaggccacaagcctggttgaatgtcttgcctgctgattgaagaatttctccctttggtcttgagagagcatcagcagtaatcaggcggtggttgccatgggctttgggcaagacccggtgctgtgctggcttcaacccagtgcagtcctagaggtggtatcccctagagagatgcttgtgtcctcagttctaggcaactcagcacggacagaaagactctgtttgtttggtggaaagtaaggggatagaacaagagtgtctgccaggtaatacaaggaattatctcagatcttaactgagaccaccaaggcaccttgattagtttgcaagagtcatggagttactggtcttaaggtgccccctaatgcagatatggctgcagtgaccaaagacttaaatcacaacactcaattccccttgaataaatttggaaagcctctctaagaaggatgggtataataaacaaggcccagactgtgaagactacaataaatacctaactctttaatgcccatacattgatgaacattcacaagcatcaagacgattcaaggaaacatgacctcaccaaatgaactaaataaagcactagtgacctaccctggagtgacagagatatgggacctttcagacagggcattcaaaatagctgttttgaggaaggttgatgaaattaaagataacacagagaagaaattcagaatcctatcagctaaagagatttatcaaagaggtttacataattaacaagaatcaagcagaaattctggacctgaaagattcaattgacatactgaggaatgcatcagagtctctcaattgatcaagcaaaagaaataactagtgagtttgaatacaggctatttgaaaatatactgtcagaggagacaaaagaaaaaagaataaacaatgaagaacacctaccagatctggaaaatagcctcaaaagggcaaatctaagagttactggccttaaagagaagagacagagagatatttgggtagaaagttcattcaaatggataataaaagagaacttccaaacctagaggaacatgtcaacattcaagtacaagaagattgtagaacaccaagcagatttaacctgaataagactatatcaagacatttagtagtcagactcccaaaggtcaagaataaagaaaaaatcttaaaatcagcaaatgaaaagaaacaaataacataaaatggtgttccaatacatctggcagcagacttctcaacagaaacttcacaggccagaaaagagtggcatgacatatttaaagtgctgaaagaaaaatcttttctcctacagtagtatatccagtgaaaatatacttcaaatatataggagaaaataaggactttctcagagaaacaaaagctgcgggatttcatcaataccagacctgtactataaaaaatgctaaaaggagtagtacttcaatctgaaagaaaaggatattaatgagcaataaaaaaaattatatgaatgtacaaaactcactgccagtcataagtacacaaacacagaatattataacactgtaattatggtatgtaaactactcatatattgaatagaaagactgaaagatgaacctatcaaaaatgagagttacagcttttgaaagcacagtatgataagatagaaataatgaaaagttaaaaagcagatgtgattaagttaaagtgtagagtttttattagttttatttttacttgtttgcttttgtagtcagtgttgttatcagtttaaaataatggattaaaaatattattttcaagtctcacagtaacctcagtttaaaaaaaaagcctacaacagatatgcaaaaaaaaaaaaaaatcaaaacataccaccagaaaaaataattgaattttgatctttttctaggttcggaaagttctctgttatctctttgaataaaattctaccagaatctctctctcactagctcttctttaaggccaaacacagcagaaacaaacgaatttgaaataaaaaaatacaaaagtttcaagaaaatgaaaagttgtttgcaaagataaacaaaaatggcaactttagccagattaactaagagaaaagagagaaaatccaaataaatgaaatcagagagaatattgtctttacaaaatggaagacaggaaggaaggaaaagaagactataaaacaaccagaaaacaaataacaaagtggcaacagtaagtccttacctatcaaggataacattcaatgtaaatggactaaattcttcaatcaaaagaagtagggtgggtgaatggattaaaaaataaaactcaatgatctgttgcctgcaagaaacacacttcacctataaaagcacgcataaactaaaaataaataaatgggcaaagatatttcatacaaacggaaaccacaaaaaaagcagtattagctgtatttacatcagacaaaataaattttaagacaaaaactataaaaagagacaaataaggtcattacatgataaaagggtcaattcagcaagaggatataacaattatgaatatatatgtacacaacggtgtaacacctcgataaataaaggaaatagtactagagctaaagcgagaaataggcctagataaaataaaagctggaaacttcaaaacccctctttcagcattggatagaacaccagctagaaaatcaacaaagaaacgtcagatttaatctgcaatatagaccaaaagtacctgatagttatttacagaaaatttcatccaatggctgcagaatacacactcttctcctcaatgcatgaatcactctaaaggacagactatatgttaggccaagcaacaagtcttaaaacattcaaaaaacataaaatcatattgagtatcttctctgatcacaatggaataaaaccacataataagaggaactttggaaacaatacaaacacgtggacattaaacaacatgctcctgaaagaccagtagatcaatgaagaaattagaaagaaaattaagagatttcttgaaacaaatgaaaattgaaatacaacatatcaaaacctatgagatacattaaaagcagcactaagaagaaaatttatagcaatatgcacctacagcaaaaaagcagagaaacttcacataaacaatctaacaatgaatcttaaagaactagtaaacaagagaaaaccaaacccaaaattagtagaagaaaaaaaaatgtaacagcagaaataagtgacactgaaatttttaaaaattacaaaaaacaacaaaatgaaaaatcttcttgcaaagataaacaaaaatacaaacctttaacaagattaactaagaaaaaagagagaatatccaaataaataaaatcagagatgaaaaaggagacattacaactgataccaaagaaattcaaagtattattagacagtactatgagcaactatatgcaattaattggaaaaactctaagaaatggataaatttctagacacatacaggattgaacaataaagagatccaaaggctgaacagtccaagaataaataatgagatcaaagctaaaataaaaattctcccagtaaagaaaagctcagacatgatgacttcattgctgaattctaccaaacatttaaagaagaattaataccagttctactcaagctatatcaagacatagaggaagagaaaatacttacaaattcattctatgaggtcagtattatcctgataccaaaaccagacaaagatgtatcaaaaaagaaacctataggccaatatccttgatgaatattgatgcaaaaattccttaaaaaaatactagcaaactgaagtcaacaacacattaaaaaaaacattcatcatgaccaatttggatttatcctagagatgcaaggatggttcaacatatgcaaatcaatcagtgtgatacatcatatcaacagtgaaggacaatgatcatttaaattgatgctctataagcatttgattttcaacaacccttcatgattttaaaaaactaaaaacacttggtatagaagggacatatcttaacacaataaaagctatgtatgacagacccacagttagtatcgtagtgaactggaaaaaattgaaagcctttcctctagatataaaacaaaacaaggatgcccactttcaccactgttattcaaaatagtgctggaggtcctagttaaagcaatcagacaagagaaagaaataaagggtgtccaaattagaaaggaagaagtcaaatttcccttgtttggagataatataatcttatatttggaaagacctaaagactccactaaaaaaaccattagaactgataaacaaattcagtaaagttacaggatatgaagtctgtaaaaatcagtagcatttctatatgccaactgtgaacaatctaaaaagaaatcaagacagtaatcacaattacaatagctaccaatacaataaaatatctagtaataaacttaatcaaagaaatgaaatatctctacaataaaaagtataaaacattgatgcaagtaattgaagaggacacaaaaaaatgaagctagctcatgttcatgaattggaagaatcaatattgttatccaaagtaatttacagattcagtgcaatccctatcaaaatatcaatgacatgctttacagaaattgaaataataatcctaaaatctatatggaaccacaaaagatccagaacagccaaagacatcctgagcaaaaataacaaaactggaaaaattacaatacctggcttcaaattatactaaagacctatagtaactaagcagcatggtactggaataaaaacagacacatagaccagtggaaaaaatagagaatccataaagaagtccacacactaacagtgaactcattttcaacaaaggtgtcaagaacatacactgtggaaaaacagtctctttaataaatggtgctgggaaaactggatatccatatgcagaagaataaaactagacccctatatcttgccatgtacaaaaatcaaattaaaataaattaaaaactgaaatctaagagctcaaactatgaaattactaaaacaaagcatttggggaaactctccagcacattggcctgggaaaataatttttaagaaataccctaaaagcataggcaatgaaaacaaaaatgtacaaattggattactttattaaaaagcttctgcacaacagaagaaatcatgaacaaatttaaaaaacaacccacagaatgggagaaaatatttgcaaactatccatctgacaagagaccaataaccagaatatataaggtggtcaaacaactcaataggaaaaaatcttataatctaatttaaaaatgagtaaaagaaatgaatagaaatttctcaaaagaagacatacaaatggcaaataggcatatgaaatggtgctcaccatcactgatcatcagagaaatgcaaatcaaaactacagtgagatatcctgtcattccagttaaaatggcttttatccaaacagctaacaacaaatgttggcaactatgtggagaaaaggaatcctcataaactggtgggaatttaagctagcacaaccactatggagaaaagtatgtcagttctatggagaaaagtaggtcagttcctcaaaaaaactaaaaatgaattactatatgatccagcaaccccctgctgggtatgtacccaaaataaaggaaaccagtatattgaaaagatatctgtattctcatgtttgttgtagcactattcaaaatagccaagatttggaagcaacctaagtgtccatcaacagatgaatgggtaaagaaaatgtggtatatatacacagtggagtaatattcagccataaaaaaaatgagatcctgtcatttgcaacaacatgaatggagctgacggatactttggtaagtgaaataagccaggcacagaaagacaagcttcacatgttctcattcatttctgggagctaaaaattaaaacaattgaactcagagatagaatgatggttaccagatgccgggcaggatggaggagaaggggaaatagttagcatgtacaaaaatttgttagatagaatgtataaaatatagtatttctttttgttgttttatttgtttgtttgtttgtttgtttttgacatgtggtcttattccaatgcccaggctggagtgcagtggtgtgatcatggctcactgcaacctcgacctcctgggttctaacaattcttcaacctcagcttcccaaagtgttgggattatagacatgagccagcatgccaggccagatctattatttgatagcacagcagggtaattacaatcaacaaaaatttgttgtaaattttaaaatgactaaaactgtataattggaatgtttgtaaaacaaataaatgataaatgctcaaggtgattgatgccccacttacctgatgtgaatattatgcactgtatgcctgtatcaaaatatctcttatacctcataaatatgtacaactactatgtacccattaaaattagaaaaaaattataaaaagaattactggaatatgaagtgtaggtggtcagagaaggacttttggaggaagtccagatctgaaaggtaagatggagccaggaatggtctgaaggcagggaggtcccatgcagcaaataaacaaacacgaagtatctgaatcagaaatacagttggaaattttgaggaataaaattgtcagtgtgtattgagcatagaaaacaaaggtagagaagtatcagatgagctcagagttagacaggtaccacgttatctaagatgttataggctggagtaagaaattggaattttattataatgtcaaagggtagcattggcaggtttcaagcagggaagtgacattacctcatttgcatgttttatataagatcactttagcagctgcatagaaaatgggttatgaggatgtgatatgtagaagtaaggagaacaaatatgaaactattgcaggtgtctagggacagacggtggcaggtgagatgagattagtagtaggaactatggtatgaagtagtcatatcaaaattttggagggatagccaacaggacgtttgtagactgaaaacagatggataagtaaaaagtggaatgttagaggaatcacagagtttacggcctgggacatgtgtaaatcatgattttgtaactgatgagatagaggcaggacagtggagacagttctgtgggaaaatcagtttgtcttttgtgtatgtgttatttttgaaatgccaatttgatatccaaaactcaactgtgacaattatagggaaacttggattcaggagtttaatgtgggaaaacaagttatttgcattttcagtgctaagagcttttctcagaaatataattacaattttagtcattctcttttaaattctattagattaattatttgccacaatcaacatattcatttaataagactctaaaaagcatgtcatgcatccagtcacaacacgtaacatgaccataggttatttttaatacaggccctactaactttgtcctaaactacacgctttggtgactgaaaaatgtttgtcccatgaagtgatctcatgagtaaatgatgaagtagagatggagaaatagtagtgaaggcctctggtccctaatgccctagccatctcgcccactgtcatccccgctaaacacacagcacagattttgaactcaagacttcttcctgtgactttatttaaatataaggtcatataactttttaaaaatttgtattccttacccctaaagtcttgcctttgtctggaatgctttattctactgcaatacttagccttgagtaaatttatttatgccttttatttcatatctttagttctgtcttgaggtaagatgactttagagattatgaggaatgaaacagccctaggttcagaggcctcagaccggcctgcagctgaaggagagttaataaagaaaacctgttattaaatggaagtgcggtggcaagcatatctgtcacttttcccaatcaatacagaagccgtgagaatgagctcccatttcatacatgttatgttatagggctgaagatctctctagcattcgtaaaatgacaacgggataagagcatgcagtggcaaaaaaagaactatttatctgcagaagcgctataagccctgagcagtatttccagaagcatgtccttaaacgttctattaatttataaatattttgaagtgaccctggatttcatgtgtgtgtacattatattgagccagagttttgattactttccaaggaaaccagtaagtgtaataatttttatgtagcaaaactgctagtcatttctgctacacaaaaatcccctggtcactttttgttatttgtgtgaccagggaatttttatgtagcagaaatagctagtatcacaaaaaaaaaaaaaaaaaaaaaaaatcatactattgtttccttaacattaggaaagtggccagtaggaagtggctacatggttagccagaacccccttgcagttaggtaggggcatgtgacaatgttctgctcaatgaaatattatacagcagaagtgatgggcactcttacaaaactgacccataaacaaatcatacgtatacttctccatgatctttcccccttctgactgaaatgggaatatttcacagaaaaatcttggaagccatgtgttgaagatgccagggcctcggttagcctagctctttgaattcccacaggagaagagttgaagatgcagaccacctctaacatctccaaaattaaactaaacagtttttacttactgtttttttttccttacagcttttaatggcatcatattttttaggatatagggaatctaaaaaatactctatgcaggaatatggctgatcctcacaagattggatgagctctgctgttaccaagcccttggcaatttccagaactatcaggctattgggagatgacatctgtttttgtggcctgctcagcatccttaacctcttatttgataataacatcttggattgcctctgaggaactacagatctcccactgcatacattcttagcaaagtaccaatcatggtactccactactccattctttcttggtcaagggttgagcaaaaaacaaatctaagtaaatcagaccctctgtacctgaaatctctaggggtgtgtcaggcagaatgtaagaggaactgaaaatggttgtcacaaattcattttgacagctgcactctgaaaatcattatgtcctacatcctagatcctcagatttatccttagaacctgaggtgtttgtttgtttgtttgtttgtttggtatctccttcaattctctgaactttcacatttcctttcgataaatccctttgtatttatattgctttatgttagtgtcatatatttgttagctatttctgaaaaacacattaccctaaaacttagtcacttaaaaacaacagtaaatgtttatttctcatgttctgtggttaagagcttgggagtgtctttagctgggtgattctggctcagggtctctcatgggactacagtcagatgtcagctaaacccgtaatcatatggtggtttgatcaggaatggagagtccccttccaaagtggctcactcaaatgtttgacaagttggtgctggctattggcaggaggccttagatttgttcttcatgggctttcttcttcttttttttaatttccaatttcttttatgttaggttcaagaggtgcatgtgcaggtttgttacacagataaattccatgttgtagggttttggtgtactgataatttggttacccaggtaatcaccataataactcataggtcttttttcaatccttactctccttccaccctctaccctcaaataggccccagtgtcttttgttcctttctattgtccatgtgttctcatcatttaactcccacttgtaagtgagaacatgcagtatttggttttctgttcctgcattaattcacttaggatagtggcctccagcttcatccatgttgctgcgaaggccatgttgtcattttttaatagctccattctttcttggtcaagggttgagcaaaaaacaagtctaaatcatggtgtatatatggtgtttatatatcacattttctttatccagtgcaccattgatgtgcgtcctggttgactccatgtctttgctattataaatggtgatgccatgaacatatgtgtgcatgtatctttatggtagaaggataattattcctttggatatataaacagtactgaaattgagggatcaaatggtagttctattttaagttatttgggaaatcttaggactgctttccacagtggctgaactaatttacattctctcatgggctttcttgggaatcctcatggcataatggcaggagaccccagagcaagtatctaggagactgaagtggatgatttttatggcttagcctcagaagttatagataaaggaaacagagatatgaggaggctattttaaattttctaattaaaaatggaagaaaaaaactgtaatgagatattttcatttatatgtcatttatgtcacattctattggtcagccagtgtgagtcttgattcaatgagggagggtctatacaagggtgtgattactaggacacaaagattattggaggtcatcttggagcctgatgaccacatagggttaatttctgtttcttgcaaccacagaaacctagctggtgcatcagattaagttgaaaaagtgcgggctgctttcacatattcttaataattttaagaggtcctctagaaaaattcaacttctgagagaaaagattccaataatttggcagtattcctcagaaaatatgtatttctattagttatgtgttcctggcactggattttgattatgatgattataaaattttcagttgtaaatgtgtctccaaaccatgggaacttttaaataacaatactgtacaaatcttgatgatggtgagactaggcccaagaccactttcttaaccatggcatgtgtccatagtaactaatctctcacatttccaaaagattaaccatttatctgagcatttgcagtaatacttagagacatcaatgcagatggtccctgacttacaataactcagcttatgattttttatctttcccatggtgtgaaagccacatgcacgtagtacttaaagtacccatacaaccattctgcttttcattttcagtacagtgttcagtaaattacatgagatatggaacactatattataagtaggctttgtgttagatgatttccccaattgtaggcaaatgtaagtgttctgagcacgatgaaggcaggctaggctaagctatgatgttccacaggttagaggtattcaaaacatttccaatttatgatgggtttattagaatgtaacccatcaatacagaggagcatctgtataccaatacaagtactttttttttccctgtgagtcatagtataagattaaagtaacttcctttagtaaattagaaccaaaaagagttggccctgtaatgcaactttcttgttttagaattgaagaaactgaagcccatagaaattatgcaatgttcccatagccacccagttgattggaaagccagaacttgaaccaaggtatcccaaattccatagcagtattttttttttctattacataagtctaaactgtgctatttgactagaagcttacaaatcagtccagttgttccatttggtatttgattgacaagagcatttcatacttccttctggattttatcaaaagtaatagtacagtaagtatatgaagaaattgtaccatatgactacttaatccctctttaagcaggatttggagatctgagcaggcaattctttaagtttccaattaaaactgaagagaaaaagcataatgagatgtttaaaagacaatttatagggtgtacagacttgttgtacagttccttaagtgaattacaaaagcacttaacttatacttgggatgtgatcttcaactcacaggcagtgcccagtggttttctgattttacaaccgatatacttgaagaatacttgggaggctgtcatttggagtgggggaagattcttaagaggcaaaaagccaagagagtgagacagaaaaataggttttggttcttaactggtgagttcagcaaatggtcttaaagattgcattttctctagagttcttggataagctaagttatttgtaactgctttccctggaactcttagattggtagtaatatttgggagcataaagattctttgccatataccctcacctaaaattctagatctgaggatttcaagtctagctccagttgaaggaaaactaaagtaggctttctcaattcagcatattgacatttgagtcatataattttttgttgtgggtgttgtcctgtgcattgtaagatgttcagcaacatccctggctttcaccctcaagataccagtagcagccctcccctaattgtaacaaaaatatcttcagacattatcaaatgtcccctgggggacaaaatctaccaaagttggaaatcactatcctaagggaagattctgaatcattcactgagacctgagacagtctggacaagtattttaaatagcaatactgtacaaatcttgatgatggtgagactaggcccaagaccactttcttaaccatggcatgtgtccatactaactaatctctcacatttccaaaagattaaccatttatctgagcatttaataaagcacagatttattttcttggacacataacactcttcaggatcactgaagtcactttcatcaaatgattattttgtacctgttatgccccaggcattgtgttagccacaatgcccaatctatacagttcatgtccctgaggagactccaactacttaatggtcttactgtcactcaggctacagtcagacttatttacttctagaatttttcagtaatgtttttgtcaaacttacaatcctccaagtttggagccaagtccataaaacagaagtatgtcaagacaatgtcaatcaattcactggttcagtgacaagactaccagatgatgtttttggctaaaaattagcactcaaactcataaacaaatggaaacagtctacactctaaaattagttctgattttctcctagatttcttgagagttttgtgaagagagacttttctaaaactggaatatgatttttgctcagataaattatgttgttcactttgccagcctgagtagctttaagggtagaagtggtaacacatgaagctccctcaaaattgctttcagggagatgagagagatactaaaaacagggatggaactgttcaatttttggatctgttgagctggaatcacgaatctgctaacaagtgaaacgaagccatttgtaaaaggttcatcttccagggagtcccatggcaattttaaggcagatttcccatcgagaccgtaggatgtcaatttatgaaaattgaactggattcctgaatcgctctataaattttaactaaaacaatactcccatttcaagtatttatggcctctgcctctcttggcttcagatcgtcagaagtacatatttggaggcattcagaaacttacaaaaacaaaagcatgcacttaaaacttcttttttaaatcaccgactcaccctctagctagagaagaaaatcccaacaaatcaactggagacttagcaagaaaagaagtactggaggaggttttaaaagggagcaggaaaacagaggtgaaaatagcttctaagtcatcagaatagatctttctgcatgcagtgaaagaatttaggtgcaacatatatcctcaaaaccttgaaaaaaatgtattaatgggaaaaggggtttagttcaaagaatgtggattttgaaaacacagtaatgttcacgtttcaacttggccatttattagctatgtaactttgggcaaattactcaatcctttaagtgctggttctcccaatcgtaaagtgaagttttaatccactacttaagggtgttttaaggactaaatgtgataatatatttaaaatgtgttttgcatgacctatgcctcttacactgtagccacaaatttaattattggtttgcttgtttgtttgtttgtttccatctggactaagtatgaggataaattgtggtagacaagagtaaaactgaaatgtagagaggaatgaaacttcaaaataaatattggatatatatacataataaatatatatatatcgtatgtacacacatatacatgtatatacatatattatatatacaatatacatacattatatatacatatatacatatattatatatactatatacatacattatatatacatatatacatacacacttatgtgtatgtatgtatatttgatgctatgaatacacatatgtaaagcaacaatgctgtgtaatcacaggaatatgagcaccagaattagatcatttctatttgagctttgaatctaccactaactgtgttatcttggttaggttatatcacatctccatgtctcagtttcttcaaccttaaactagggaaattatatttgctactacaaaaaattgtgatgggggctctcaaaggtaatgaaagtcaagtagttagcacctaaaaagctctcagtaaacaatattattattttagagacaacgatgtccacagctcatgatggcagtacacgtataacatttcgtttctgtgtatacatctgtacatcatgtttttgggtatcatcctaataaatttaaaagtctctgtttatcaaattataataaaatttgatatgataatttcttctgtctgttatcaaagtcaaaatttgtctttatgctgtattgttcagactctagctttaagaaaagctaagaaattgagcccaaagggattcctctccagcattagcccttaaatgtatgatttctgtagctggctgctgttttgttgtttcttgctgtacattatctagcctaatgacaaagcttaattaacacattttattctattaaagtgctttgttttgcaaatacatttggagggatttttgtcttttacataaagaactcacatttattgtgtattcttccccctacaatacacaccctaaaatttgaataagaaacaagaaaaacaaggagaaaggcaactgccacagacattttatgcaagcagaactggttttgtatctgatatgttgagtaaagcaaagcaagtaaaagtgggggacagtgtcattggagatatgtttatagctttggggatggggtggagaaaggtcaagggggtttatataatccaggacaggaagaaaggaatatactattacatgagcaaaaaaatgaggagcactatttatcagaccagatcttgaattttatatgctttatttcatttaatcccaaatcaattttgtaaggtaggaattattattatgaccaatttatagctcaggaaactagatcgtgaaaagatgaaatacttggccaaggtcacagaactgattcaatgcagaattaggactaaaaacatcgtctgctgaggttagactcagctcctcttcttaatttttttttttttttgacaatggcacttcaaagttaatggcattttgtccattttcctgagaagaaaacaaggtttagatagcataagtgactttccccttactgacaactgggaaaagccaaagttttgatccaactatgtatctgggttcatactgagtcatagaaaactacttgctatttttctagctatggagtatcaatatggtgtgttggatttcccttcaagggagtacactcaatgaactgcattcaacttggggaaaaaagaaaagactaatagccagaactgagtgcaaaaaagtgacatgaggaagtttgtgataagactacttttctcataggtgcatgccttcccttcagttgactggtctccatgtgtctatatcagttagcgactgccaggtaacaaaataccataaaattcagtgggcttaagttgataaccctttagtgttgctcaagagttaaggagtcatctggccacgtcttctggtcttgattgagctggcttacacatctgtggtcagctgtgggtcaggcacagctgtgctggtgcacactgtgcattctctgtgcttaggaaagtcagctgttggctaggatactttgttgcacctccaactggcctctatctaccagctagcctcaacttgtacataatgatggcagagttctaagaacgcaagcagataccacaaaaactcttgaggcctacatgcggagctaacacactatgccttatctgtatttcattgactaaagcaagttgtgaggacatcccagattcaaaatgatgacaaaggggatccactgctgcatatgaggagctgtaatgtcacattgcaaaggagtagaaaatttttccttcttcgaagttaacctaccacactgctctcataaaaatgatcagccaaatgtgttctcactaagatataaatggattatggcacttgttgcatgaccgccttgtgaatgtttgcatttttgatgtaaaagtattatagaaagacttctaccattatttgatcacttctagcagccccaaaagacatttttgagattaacaaataactctttttaaaaatatatgcctaacaaatatctatagataaatctcaaaatctgagaatgaggcataatttcttctctctcaaggcctacaattaaatgggaaaaacacaacatttataaaagggttaaataagctggtaggtttttctacaaataaggtaaatacatgtttaccctttctatccttttgattataccaccttactgagaacagaacagaataaccaactctgggaaatcctaaaataacacttgaaaaggaggcaacagagatgaaaaatggccacctaatttcttgtttatgtcttaaggaataaaaaccatgtgaaggactggtctgcttattgaaaggaagcatcttgtggtgtcaggaaaaaaagcccaactggtaggagagggctgtgttgattagggctacctcagaacacatgttagactgataaggtctagaaagagctgggagtttgtgctaagagttcccacttccctttcccttaagaaaaaaaaaaagctagcatatatatatgcatatatatagctagttttatatatcaaaagctatatatcactttttaaaatataaaaagtatatctatgtagatgtagatatctttttattcaaaggataaccatgttacaaggaaaaagactgataataccaaaacttagaggatatatggagccattgcaagtcatacactactaatggaagaataaattggtaaaaccactttggaaaactgcttaatagtatctactaaaattgagcatatgccttcctcttgacaccaaaacttctcttctgaaaatatgcctaatagaaatgtgcacatatgttcactagtagacatgtactagcatgcatatagcagcactatttgtaatagccctaagtaggaaccaaaccacacctgtgcaggtagaaatcaggataatggttacctttggtgaggaatgtctgggagggagcctctgggggcttctgagtgttgacaatactctatttcttgattttggagaaggtgtgttcattttatggcaatacatccagctgttcaattatgatatgtgtgcttttctgtatgtatattatattgcattttttaaaaatagccatattgtaaagaagttaaaagtctaattgaataaaagtaaaatgaaaacccacagtgctaaacaaagcagaggctagcacattgccagccttcaatatcagaagccagcagaggcatccaagagttgaatttctgtgggtcaactgggaccaaatgccctgcataagtagcagagtaccacaggctcaccaactgaacttcataaaactggagcgagctgggtgggatttcactgttcatgaggggagactgaagaaggctgaaattcttgcctgaaatggtgactgcagatagttgactggttgacagagtgacatatagcagccatgcacagaacttgtggaagcctaagactggctcactgatggaatcactactcccctaatagctatggagcagaagttatgagacccaatataagttctggttctggactgagaatccatggggactcaggtgggggcaactgcaaaacaaccagggagaaatgagcaagagaaagacagagggaaattttaaaagatctttaagataaatatacaaaataaaatttcaaaacaaaggacaaaaattaacaaaagaaagtgaataacagcaaacaagtaagagatgaaatgactcttgagagaatgaaatggtagcctactcaacataatttttaaaaggacctttatgtctctgagagatagaataagaaacaacatctgtaaaatatattaaaagttttaaaacaaatatattaagagtgaatatgaaggaagataagattgagaacagatgaatataaaacatggcaaaggactagctgataaaaatgtataaaatacatgcaacactttataatatcccaaactggaaaaataatctaagtatttatcaatcaactgatggatatgttgcttatccatcaaatggaatttgagcaataaaagtgaacacattactgttatgtaaaggtaattactacaacatgaatagcccttaaagctattatgctaagtgaaaggagcaagacatgaaagcctacctatcatacgattctatttgctatggtttgactgttgcactccctgaaaattcatgtattgaaacctagtcaaaaatctgatgctaagaggtggtggctttgggaggtgattaaataataaggacagagccctcatgactggaattgttacctgtgtgaaagaggcccaagagaaacctctcaccacttccataatgggaggactcagtgagaaggtgccatctatgaaccaggaaacaggccctcaccagatactgcatctgacagtaccttaatcttggaggtactgtcctggcttccagaactacgagaaataaatttctgtcgtttatatgctacccagtttatgatattttgttatagtttttatatatatgttttatatgtgttatagtttttatatatatatagtgtgtatatatatataaatatatatatggttttatataaatggtgtctaagtctgtttatatatatactgtttttctatatatactctttatgcatatatgtacatactgttcatatatgtgtatatatatatactcagtatatatagagtatatatatacacatatatatactgtgtatctatgcatatacatactgtatatatgtataaatactgtatatatgtgtgtatatatataccatatatgtgtgtgcatatactgtatatatatgtgtgtgtgtatatatatataaatatatatatggacttagacaccattcatgtacaacatccagataaaagcaaatttatagagagacaaactctttcaccaggatttctgattctcttattatctctttgcaagtactttcgaaagtcttctaaaagtcttcttagaacattttgatatataaataagcaagaacaaaaattggtgtgtatgtatgatttgtgagtgatagaaagacagagacaaatagagggtgagagacagagggaggaaggaagggagatatttgttatcatttatctgataatattcaataggaactctgttgttcaaaattcctcccatttagatacatgggagaaaatgtggtttagcctattaagacccacatgaacaggcttactgccttcactaatgccaatagtttattggaaaagaggaggttttatctgaaagaggccaatagtttgcctgcctgcattttttctttatctgtttttgtatagacaacatcttaaaatgttagatttgctccacttggaatagtttcatctggagcaaatatatagtcccttggctttaaagaatgggacattcagagctgatcacacccttggattcaataatcaaaatagccaaatttaatctgaatatgactagagacattgtgtgtctgcatcccatgtaagtctattaaggactgagcttaaggcatacaacctagaggtttcttccagtgattttcagtcttagagtttaggagttgaaccaaatagatttctatgcaatgtcaatagatggagagttcactttctgtccaagtccaagtaagtccactatgttgatatctgggactaggaccagaaccttgcatgcacttaatagttgaaaacagaacttcctatttttaaaaaaaaatgagaccaaggaaaaggtttttctttgaagttttctataaaacctcatggggtggttataaggatttgtgaaacattaaatatctttgagtttggagaattggcattgtagcagtacaaaattgtgttcctttttttctccttttcttaataaccccattacatgaccttctaaagtgtttgttcccttaggaaacataagatgatttgcaatattctgtaataaaacttggaaaagatagtcatagcgctacttcaataattatgaacattgcttttagctgcaattttccaacaaaccgttcatacagtaattgtgaatcctggaataatgctttggcctagagtacaaatgtcccctcatgttgtttgtggtatgggctcagcattcctgctccttgggtatcctgaagctttgtcacttggcacatgaatgatcttaatctctaaactggatcatgaaaacaaacaagcattatggccttattcctggaagtacagatctcttcctggctagggcttctccttcaactccaagaatcatcccaccctctcccaaccggcacaggatcagcttgtttgctcactgaagactcatgcttcagtgaatactgtgattgaagttcccagttggtgcagtcaacattccagtgttctgtgatgattgtgagccagcatctgtctgctgatggcaatctctccgtggctttctcacagctccaccttcccctccactcacatacattcccccaacaccagggctccaagagatgtgtttctccagagtgacccatgcacctacctgtcatagagacagattgttttcttgttaagagatggtcaccaggttacgtcctcagatttctggaaggaagaatatttctcctcctttttgctcagccaaaggacttctaattaagattttttttttcttcttttgagttttcattgtcctcttggcaatcagacagaacatagcctgaccacttaggtaactttacagagaataaatgaaagctggacagtttatgaaaaactaagaaaagctgagctgcttgacggatttctaaagaagaactgctttcatgaagcaggaaagaaagtacagatatttgtaatgaaaccaggaacttcagggccattcagccagaggctacagacccccacaacggtactcattttggagacagcacaattaatttcaattctacaaatactgcatagagaaacaaagagtgaaaagagcaagaaaaagagagcaagagagagaaagaaagaagggagagacgggggaggaaaaaataataagagtaagaaaagaggggtaaaggaagatgaggatttcttttccccaatttgcttatagcaggtgttaaaaacagtccagggaatctaaagaggttcaacaaaattgtattcaggatgctgagatgggaggatcatttgagcctgggaggtcgaagctgcagtgagcaatgatagtgccgctgaactccagcctaggaaacagagggagaccctgtctcaaagggaaaaaaagaaaaaagaaaacacctcaaaaacttactaagatgagatttggtgcacacttggtgcatggagtgttcctgtttgttaatctatgctcagggacttgcaaatttcaaggacagcatctataaactcatgagggtttgcaccctaggcaaatagctctcatgtcaccctagtattctgccactttttagccaggctgatgactgaaatgtcattttacttggtcttagtcctcatctgggtgaaagccacaaggaccctctttctgatgatgtcagcacaatttccaaatattttcccagcttaactctggcatttttgtctatctttttgatgggctttatgagtcaagaaaatgaagaagcttttaatgattatgttctccttggattggactgggttgccattgtgattcctccacacttggtggcagcgctgatgaacaaaaacaatgggctttttttctaggcttctttcagaacgccttaataggaaacacattctgcattccccatgtgcatgttttcagtgaaaatctttatttaattttagtagagaattcagtccaagggttcttccatgtaacaaagggtagtactgatgggaacacatccctggaggaaattttagatgtagattcctcagggggcatctaggaaagcaacaatgcttaggtccccaaatcatgttggtatttctgaaaagtgttctgctccccttgggtatggatttttttttttctaaccaaaacagataaagaagaaagcaaagaaagaagacaggaaggaagaaaagaggggaaaaaggaaggaagaaagagagggaggaaaagagagaggaagggagggtggaagggagggagggatgagaaagggatggagggagggaggaagagaatgaaattctttaaactaatcgttaatctttaggaattcattttcattcttaccttcactttccaaacaagaagttccaatctgttccaattgataatttaaagggaagactctgccagctgagcaaaaacaaagggtagggggtgttgagaaaaacttcttaaatgttttgttgcagccagcactggtgccttctggatactagggataccagggtcattcagggatatctaactttctgttcatttctgagaaacaaacttcccctggattccttctttctctttggcttcacctaattctcctcacctgttttcagcagtgaggaagctctttattttacccagagtcactgtttcccccagccctctttgtactagagaatctggatacctccacctgcagcctgccaccctgcatactctgatactatgtgtcttggaagctttgccctgaggaaccatccagagaaagttcagccatcctttttgtgggtttatgccccgttaaaactgggattggaagcatgtttccatgtttccatctgttaattaccaatacacagcttgacatgcctgtgggaagccaggagccacttggaaaggtgtgggcagaggattcatctcatccaagcagccccctaacacatgactgctgctacgtgtcattgtatatagttagattgacatgggcataaaggagcaaaggagaagcccaatccctactgtctaaggaaagcaccggtgctattaagctatttgaactttccctatcacagcctaaaaagcactcagacatttttatcagcattccaaggcaaagattcattggatagagtattttttccccaacgtaatccagatctccctttagaagacgctgggaatttacacgagaaatggggcaggccatgagcaaaacaaaaaaatgactgatatccttcttcggctttcatgaatttttcttttagctttggcccccacctctactactgatcaaaattccagggcttataaagtgctggtgctcagctaggattacgttaggataacagaaagttgagtcactacaggaagacactgaagttggcttaaaggcttaattatctccacccagacctacatttatgcataaaaagctaccaagctaggtaaatctttaacagtagcatggcaggctgtgccacacaaagaatcttaagtcatgtaaatcaaattataaagaagatttctgccttgatatttccagaagaccagtcttgatcaaaatctcaggtgtccagttttggagcttcccatgtggtgaaatatttgacaaccagctttgagggctcgttgcttccctttgaaaacaccacagacctgtgggatttgaagagctattatctgagtcttagagatgggggtgacatccttttcccactattagcccaatctctaataattggctccatatagactgaataatttcttaaccatacttctttttcaggttcctgtctcatttcatcttgaaatcagagtattagaaaaatccaaagttattcagtgtttcctgactaaggaaacctcacaatttctaaaagtcaaaaaagttcaaatattccccctatcaacaagcacacttgccagtggtatttcaaaattaaaatgaaaaacagtaatgatagaagtgctgcagcctcactcctggcatgaacaaaatgctaacaaaatctcttctttctgcttatcttcagatgcagggtatatgctaatatgtatttcagggcaaactaatgtcaagggagggaaggcagttcctgtctttttgctattttttaagcaatcctctccaatagggctgcttctgaaaataagtttctaattaaacttcccatactatattgcagttaaatagggtaaaatttgctgtttgatgtattgagaaagcatgcaaacattagaaggcaatgtgaaggttgctagaagcaatgtgaaaccacaatttcctaggcattacgagtaattattagcaggcaagttgttgagttcaaccagaaaatgctttagttgtatcttgttgtatatcaggaacagcctaggtttgcattccatgtaaaaggagaagagaccactgttccagttggttttccaaatagaagtgaagaaaccatgaagatgtccctatatccagtcccttagccaggaccagttcagttggagcatggacagtcaaggaggctggagttctcccagtaaaggatagtgtaaggtttggacagtgtgcctttttactaattttggcaagaacatcttccagtaacagaaaagatattatacatatggtaagtagatggttaaaatccagtcctgactctgccttgtccttttttgaatgggtcaatgtgtcaattattcccttctaatgccttctgggtttgggaagtgttcaaactatctttccttcctgctgcaattagatttttataatgaacacatgtaaaggcctgcctgatgattcaaagatattctattttctcttggccttgcctgacttacatgtcctaatgatacccctgccccggtatcctttagccttgattccccatgtgtttccttttctggagatggcagaaaggctcctcattctgcttccaaaccttgagcctggaagaagttctcccaggtcaaatctctgaggaagaactaccctaccactctaaagaacagagtcacttttcttccagctcttcctagcgtttcctttaaaaaaaaatcctctatatctatggctgtcaggcaaaggacttaaataaatgaaatgtatatactaacactgttgctcctttagcccaacataaccatgccttttggccttaaaaggattaaaaggtaatactctgttccttgactctgggatacagatctattttaataatgacatgtgtcttcttatcccttgttccagcctttttgttttccttatatattattgttattaaacatactattaattccacttgtttattttgtttctgtctccccccactaagttgtaaactctgtgaaggtaaggatttttatctgttttattcacagttgtatatttagtacttagaacacgggtgtggcatatagtatgccctgaatacatgtttgttgaataagtgaattccataatgttaagtattagatgtgatatcaagtaaccagcaatcatccactgtatttacaccaccaggtcgagtgctcaaatacatcaaaggaatgtgtgactgccagtgtcagcctaaggcacctactttccagagataagaatggaaccaactcttactccttgcttaaaggaagcccatcatcatttctcctagatcctagggagaaggaggatctattcccatggttgcctctcactctgaacatctgcttctcccttggtcttgggtcatcttgccatatccccattctgaaccagaaggatccagattttgcattcatctacagtcacccacagggtgttaatggaagattaaggagataattcaggacacacacgcaatcctaagttaaattttagagataactactctgaacaaattctttggcaaatttgccctattgccagacaatcttcctatttttcccgttttgctctctggtccctgatcccaattgcagcttaatgatagaactggaacaatctgaggagtcaagtaaaatgcatctcaaaaatgtccatctcaagaacagaaaatgggagcatataggcactggatcccatggctctgttggtcaagtattaccccctgggatattaaactcccttccattccaggcttgcacaggctgagcagattgccaatggccagccatgcataaagaagccacagggcagacagcaaaagaaacttatcttgtagctaaaaggaagttctgccaagttacacatgtgcaaagtatttcgccatggcagtggctaaaataaaatatggtctagggaactaagagggaaggtataagagatatcctttataaggggaaactgtaatggcacttcccacaccagaagaattaagacaataagaaaagaacaatttttttcaatcatgatatatatttatatttatatacatatacatataaatgtatatgtgtgtgtgtatatatatatgtatttttatactttttttttaaaaaaagaatgctaaactttcagttccagtaatagtagaacaggttcatataaatcccctgctgagaaccaccacaaaagctggttgaattactaaaacaaacaaaaatgtcttgaaagcatcaaagacctcaaaagataggagaaaaaaataaaataaaataaaaacctgtgcaatttttggagaagacaatacccagagatgtaagcacagttaatcaaagttcctttggccttgagcacaattttctaatcccaagaaagaagtcataaacctaagctgaacttttcatagcttcacagggatagggcagaaatcaaagtccagacccttccaaggctgggaaacctgaaaaatcacccctccttgagcaaaagtcaaaaggcttatttccttcaatgagaataacacagtaataatggccttgcctagagtacttcctttcacctggtgatttagggcacatcaggccttaagcctaaattcaggttatctggggctggtgaacctctggggcccatctatccttccttcctccctccttccttctctctcttcctccttctctccctcccttccttcctttctgctttccttccatctatggagaaattgtcattattctaggcctcaaacttttcctgtaaataataccttaaataaatgtccatcatttgaaaactaccaggaaacaacagaaatgtggctcatggagcaagcagaagtaacatacaacagaaatcaattcacagggactccagtcacagataatatcataaatagtcacagaatagtaattgatgactaatcagcaacacataaaatggtcaaaaaaattaacagtgtacttggaaacttcagtaggaaaattggaaactgtaaaaaaagattggtagattccaagcgtttaaaaatttcttatcacagaaattacttaaaagtgtgtttaaaaatgaagaaaataatacaaaagatcaatgaaaaaaaggtttttttagaagataaacaaaatggacaaacctctagccagactaatgaaaaagaaaggaagaaacccaaataaataaaatcagacatgagaaaggagatattagtgtagttgctttaaagtctgttttgtctgatataagaatagctactcctgctcagttttggtttccatttgcaagaaatatattttttcatccttttaccttgaatttatatgaatccctatgtcttagctgagtctctttaagacagcagatatttggaaaagaagttcattatgtaatgataaaaggctcaatccaagaagaagatattacaatcctaaatttataggtacctaacactggagctttcagatttataaaacaattaccactaaacctaagaaatgagatagacagcaatacaataatagtgcgggacgtcaatactccactaacagcaccagacagatcattgagatagaacgcccataaagaaacaatggactttggccgggcgcggtggctcatgcctgtaatcccagcactttgggaggcggaggcgggtggatcacaaggtcaggagatcgagaccatcctggctaacacggtgaaacctcgtctctactaaaaaaacaaaaaattagccgggcgtggtggcgggcacctgtagtcccagctacgtgggaggctgaggcaggagaatggcgtaaacctgggaggcggagcttgcggtgagccgagatcacgccactgcactccagcctgggcaacagagcgaggctccgtctcaaaaaaaaagaaaaaatggacttaaactatacactagaagaaatggacttaacttatatttacagaacattccacttaacaactgcagaatatacattcttctcatcagcgcatggaacattctccaagatagaccacgtaataggccacaaaataagtctcaataaatttaagaaaatcgaaattatatcaagtatcttctcagaccacagtggaataaaactagaaatcagctccaaaaggaggactcaaaactgtaaaaatacatggaaattaaacaatctgctctcgaatgattttgggattaacaaataaatagtagtagtgacacaagttatcaaaacctctaggatacagcaaaagtagtgctgagaggaaagtttatattgttaaatggcaacatcaaaaattctgaaagagcacaaattgacaacctaatgtcacaccttaaaaaattagagaagaaggacaaactaaacccaaagcagaagaaaaggaataacaaagaacagagcaggactaaatgaaattgaagaaaaaaatacgaaatacaaatgaaacagaaagggggttctttaaaaagataaacaaaattgatagactattagtgagattaaccaagataaggagagataagatacaaattagctcaattagaaatgaaactggggacattacaaccaataccacaggaatacaaaagatcattctacattacgatgaacatctttatgtacacaaactagaaaatctagaggaaatagataaatttctagaaacatacaaccctcctagattaaatcaggaagatatagaaactctgaagagaccaataaaaaagcaataaaattgagtcagtaatttaaaaattgccaaaagaaaaaagcaattctggaacctgacagattcacaggtgaattctaccagacattcaaagaagaattggtaccaatcctactgaactattttgaaagatagagaaagagggaatcctccctaaatcattctctaaagctgatatcaccctaataccaaaaccaagaaaggacataatgacaaaaaagaaaactacacaccaatatccccgatgaacatagatgcaaaagtgttcaacaaaatactagttaaccaaatctaatagcacatcaaaaagatgatacatcatgatcaagtgggtttcatcccagggatgcagggatggtttaacatatgcaagtgaataaatatgatacatcacacaaacagaattaaaaacaaaaaccatatgattgtctcaatagatgcagaaaaagtatttgataaaatccggtattcctttatgataaaaaccctcaacaaaataggcatagaaggaacttacctcaaaataataaaagcgatatatgacaatcccaaagccaatattctactgaatgtggaaaagataaaagtattccccctgagaaccggaataagacaaggatacccactttcaccatttctgtttaacatagtactggaagtcctagccagagcaatcaggcaagagaaagaaataaagggcatccaaactggaaaagaggaagtcaagctatcgctgttcactggtgatatgattgttacctagaaaaccttgaaaacttatccaaaagactcctatatctgatttttaaaaattcagtaaagtctcaggttacaaaatcaatgtacacaaattagcagcactgctatacaccaacaaggaccaagctgagaataaaatcaagaactcaatttattctacaacagctgctctctctctttctctctctctctctctatacacacacacacacacacacacacacacacacacacacacatatgaatatacttaaccaagaaggtaaaagatctctacaaggaaaactaaaaaacactgctgaaagaaattatagatgacacaaacaaatagaaacacatcccatgctcatagataggaagaatcaatactttgaaaattactatactacccaaagaaacctacagattcaatgcaatttccatcaaaataccatcatcatttttcacagaactagaaaaaataatcctaaatttcacatggaaccaaaaaagacccctaatatccaaagcagttgctattgtttggctctgtgtccccacccaaatgtcatctagaattgtaatcaccacgtgttgggggaggggcttggtgggaagtgattggatcatgggggcagtttccccatgctgttcaagtgatagtgagtgagttctcatgagatctgatagtttaagtgtggtacttcccccctcaccttctctctctttcttgccaccatgtaagacgtgtcttgcttccccttcaccttctgccataattgtaagtttcctgaggcctccccagccatgtggaactgtgagtcaattaaacctcttttctttataaactaccgagtctcaggtggttctttacagaagtgtgaaaatggactaatacagcactactaagcaaaaagaacaaatctgaaggcatcacattactagacttcaaattatactataaggttatagttaccaaaacagcaagcagtactggtatgaaaataggtacttagaccaatggaacagaatagagaaccgagcaataaagccaaatatttacagccaactgattgtcaacaaagtatacaaaaatataaactagggaaagaaaaccataattcaataaatggtgctgggacatgtagaagaatgaaactggatccccatctctcacattatacaaaaatcaactcaagatggatcacaagacttaaatctaagatctgaaaccataacaattctcaaggataagattgacaaattcttctgaacattgacccagataaagaattcatgattaagaccccaaaagcaaatgcatcagaaacaaaaataaataaatgagactaaattaaactaagaaacttctgcacagcaaaataataataataataataataatcagcagagtaaacagacaaaccacagaatgggaggaaatatttgcaaacgatgtatctgacaaaaaactagcatccagaatctataaggaactcaaacaaatcagcaagaaaaagaaaacaataccatcaaaaagtgggcaaaggacatagacatttctcaaaagatatatacaaagaccaacaaacatatgaaaaaatgccctacatcactaatcatcagggaaatgcacattaaaaccacaatgtgataccaccttattcttgcaagaatggctataattaaaaagtcaaaaaacaatagatgttgctgtggacatggtgaataggaaacacattcacactgctggtgggaatgtaaattagtaaaacctctatggaaaatagtatagagactccttaaagaacaaatataaatctactatttgatccagcaattccactacagggtatctacccaaaggaaaagaagtcattatatgaaaaagacacatacatatgcatatttatagtagtacaattcacaattgcaaatatatggaacaaacctaagtgtccattgaccagtaagtgcatgaagaaaatgttatatatatatatatatatatatatatatatatatatatacacacacacacacacacacacacacacacactcaccatggaatactactcagccataaaaaggaacaaaataatgtcatttgcaggagcttgaatggagctagaggccattattctaggcgaagtaactcaagaatgaaaaaccaaataccgttggttctcagttataatagtgggaactaagctgtgaggatgcaaagacttacagagtgatataatagacttaggggactcagggagaggagaatgggaaagcagtgaatgataaaagactacgtattgagtacagtgcacagtgttcgaatgacaggtgcactaaaatcccagagttcactactatagaattcatccatataaccaaaaaccacttgtaccccaaaagctatataactttcttaaaaagcaaaaaaggagacatcacaactgatatagaaattcaaaggatcattaattgctactttgagcaactgtataccaagaagtttgaaaatatagaggaagtggataaattcctagagacagacaacctaccaagattgaaccatgaagaaataaaaaacctgaacagatcaataacaaataatgagatcaaagctgtaatagtaagtctcccagtaaagaaaagcctgggacctgatgacttcactgctgaattctacgctacatttgaagaactaatattaatcctactgaaactattctgcaaaatagaggaggagcgaattcttccaaactcattccacaaggccaatattacactgatacgaaaaccaaacaaagacacattaaaaatagcaactacaggccaatatccatgataaatactgatgcaaaaatcctcaacaaaatagcggcaaagtgaattcaacaatacattagaaagatcattcatcatgactaagtgggacttatcctagggatgcaaggatggttgaacatatgcctcaatgtgatatatcatattaacagaatgaagggcaaaaacatatgatcttttcaattgatgctgaaaaagcatttgagaaaactcaacatccctttatgataaaagcattttaaaagctgggtatagaagaaatgtcccttaacataataaaagccacatatgacagagccacagctagtatcatactgagtgaagaaagactgaaagtctttcctctaggatctggaacatgaccaggatgatcactccataaaaaaaaaaaaaaaactattagaactgattttaaaaattcagtaaagttgcaagatataaaatcaacatacaaaaattagtagcattcctataatatataccaataattaacaatctgaaaaagaaatttaaaaggtgatcccattcccaatagtcacaaatataattaagtaccaagtaataaacttaaccaatgaggtgaaagatctctacaatgaaaactatgaaacactgatgaaagaaattaaaaaggacacagaaaaagagaaatatatttcatgttcatgggttggaaatcaatattgttaaaatgtccatactacccaaagcaatctacagattgaatgcaattcctatcaaaatatcaatgaccttcttcacagaaatagagaaaataattttaaaatttatatggaatcacaaaagaccagagttgccaaacttctcctgagcaagaagaacaaaactggaggaatcacattacatgacttgaaattatattatagagctatagaaccaaaacagcatggcactggcataaaaacagacacacagaccaatggatcagaatagagaacccagaaacaaatccacacacctatagtttacttatttttgacaaaggtgctgagaacatacactgggaaaaagacggtcccttcaataaatggtgctaggaaaactggacacccacattcagaagaatgaaacttgacccccatctcttgtcatatataaaagtcaaatcaaagtagattaaagactgaaatttaagacctcaaattataaaactactcaatgaaaacattggggaaacactccaggacattgctttggaaaaaatttcttgagcaataccctacaagcccaggcaaccaaagcaatgtacaaatgagatcacaccaagttaatatgcttctgcacagcaaaggaaacaatcaacaaagtgaaaagacaacccacagaatgagagagaatatttgcaaactatccatctgacagggtattaacaaccagaatatataaggagctcaaacaactttataggaaaaaatcaaatactctgatttaaaaattagcaaaagatttgaatagacatttctcaaaagaagacacacaaatggcaaacaggcacactagaaggtgctcagcatcattgattatcagagaaatgcaaatcaaaactacaatgagacatcacctcaccccagttaaaatggcttttatccaaaagacaagcaataccaaatgtgggtgaagatgttgagaaaagggagtcctcatacactgttggtaggaatgtaaattagtagaactactctgtaggatagtttagagtttcctcaaaaaaaacacaaaaaaacaaaaaaactaaactaaaagtagagctaccatacaatccagcaatcccactgctgggcatatacccaaaagaaaggaaatcagtacattgaagacatatctgcacttccatgtttgttgcagctccgttcacaatagccaaaatttggaagcaacctaaatgtccaccaacaaatgaatgtataaagaaaatgtggtacattgtttactgtatacacaatgcagtactattcccacataggaaaaaataagattctgtcatctgcaacaacaaggatggaactggaggttattatgttaagtgaaataagccagacacagaaagacaaatatcgcatattctcaattatttgtgggatctaaaaatcaaaacaattgaactcatggagatagatagtagaaggatggttactagagcctgggaagggcagcaggagtatgtgggagaaatggggatggttaatggccactaaaaataaatagtaagaatgaataaaacctagtaatagcacaacagggtgactagagtcaataattatttaattgtacattcaaaaataactaaaagagtgtaactggattgcttgtaacacaaaaggtaaatgcttgaggggatggaaacatcattttccatgatgtgattattacacattgcatggctctattaaaaaaaaattgatgtactccttaaatatatacacctactatgtacacacaaaaacttaaaaattaaagaagaaaatttatagtgttttttatgacttaaaatatataaaaatatttggtttatgtttccattgatttctattttaattacatcatgactaaatatggagatcagtataaagcaaaatctttgaaatttattacttgaataatgaccaagcacttggtcatttttaaagatatttgtttcctaattttttagcataaaattacatatttacatatatatgggaagaaaaccccagttaattttattgctcagtcctttcatttgcattgttaattttgtttgcttgattagtatagatctacttgtgatcaattctttttcttcctatctctctcaatctaaaagtgtttttatcttgcgtttcttactgaaagatctttttttctatgttgaagttattttctctgagcagtttgaagatactattacatcttctggttttcagggctgctaatgaataatagtcattatcagtataatttgtattcctttgttggtgacttttctgtctggctgcttttcaaagtgttcaattcttgtatttgtatatgtttgcctttcattgattctgaaaattttcagcataatattttgcagttttaccctttcccctattctttatttttgttcttgtacaacagatcagacttactcattaacattaggcgtttttatttcatcatccatttgtgactctaatgaaactttgaatcacctgggaagcatattagactacagatgctcagcccgagctactgagattcagagttttcaggaggcagggccctggccactggcacataaatgactctccatgtgactctaatgaaccacagagtttgagaaccactgtaactaggcaactaggaacgtaggaaccaagataagattgtgcctcgtgtagtgaaagaatgaaaatgttgggggaaacagtttggcacataggacagagtacacaggcagagagaatcatacgaatgctaaagcaagggctgcttgttccatttgcaagctcaacgccaacgctaccccacttcatcctagtacaactttgtcatgtgggggtttcagctgtagcctttcactttaacgtgaattttctcagaaattgacttggaagaagaccatgcctgtgtccctgagacatgtattatgtttaatatatatacagagagagagagagagttcaattcacaaatcatagttgaaggtttccacaaaagtacaagatgctattctttttcccaaagcaccactcagataatacgcaggaggctgagtccactaaaggatccagtaaaaactccattattttataggtactcttggcctaaatctttaaaagattcaggaaaataaataaaaattttctcacacaaattatttctttggtttttgtgattcatcaataggctaagtgatttttcaaatcagctaaaaaatggacacttatacacacccacactcacatacccttttaagttctaaaccaacatagccacttctgctatatttagctttttttttttttttggcagctggtcctattgttgtatggatttgtttctttttttttttttggaaatcttttttttttaaatttatttatttagttttttattgatcattcttgggtgtttctcgcagacggggatttggcagggtcataggacaatagtggagggaaggtcagcagataaacaagtgaacaaaggtctctggttttcctaggcagaggaccctgcggccttccgcggtgtttgtgtccctgggtacttgagattagggagtggtgatgactcttaaggagcatgctgccttcaagcatctgtttaacaaagcacatcttgcacctcccttaatccatttaaccctgagtggacatagcacatgtttcagagagcacagggttgggggtaaggtcatagatcaacagcatcccaaggcagaagaatctttcttagtacagaacaaaatgaagtctcccatgtctacttctttctacacagacacagcaacaatctgatttctccatcctctccccacctttcccccttttctattccacaaaaccgccatcgtcatcatggcccgttctcaatgagctgttgggtacacctcccagatggggtggtggccgggcagaggcgccccccacctccctcccggacggggcggctggccgggcgggggctgaccccccacctccctcccggacagggcggctgccgggcggagacgctcctcacttcccagacggggcggctgccgggcggaggggctcctcacttctcaggtggggcggctgccaggcggaggggctcctcacttctcagatggggcggctgccgggcggagacgctcctcacctcccagacggggtcgcggccgggcagaggcgctccccacatctcagatgatgggcggccgggcagagacgctcctcacttcctagacgggatgtcggccgggaagaggcgctcctcacttcccagactggacagccgggcagaggggctcctcacatcccagacgatgggtggccaggcagagatgctcctcacttcccagacggggtggcggccgggcagaggctgcaatctcggcactttgggaggccaaggcaggcggctgggaggtggaggttgtagctagccgagatcacgccactgcactccagcctgggcaacattgagcactgagtgaacgagactccgtctgcaatcccagcacctcgggaggccgaggctggcggatcactcgcggttaggagctggagaccagcccggccaacacagcgaaaccccatctccaccaaaaaaatacgaaaaccagtcaggcgtggcggcgcgtgcctgtaatcgcaggcactcggcaggctgaggcaggagaatcaggcagggaggttgcagtgagccgagatggcagcagtacagtccagctttggctcggcatcagagggagaccgtggaaagagaggaggggagaggggagagggggaggaggatttgtttcataagagatgttggtggggtaacccaaaaagagattaagaaactagagctgcctgtcattagtttctgacatcttagaccttagtgatcttatctctggggcagaaaagaacagagtagacataagattacacagaaatggttaagtgtagtattagtaaaacaatcacctgggaagagaacatacccctctctgtcgcggtgtgattccataggaaatcaacacactaaaaggaacacgcacttcaggcaacatcaaaattgaaggaaaaacttttccaaaactgagtttgtcatgtcagatctagaagactgcatggagattttcagttgcttatctgtatgtggttatagtgagtggggaaaagctcagcccaggctcactgaactggagtgtaacagccacttcatgcctattgcccctggtaggtgtggggctgcctgattaccgcgaaagatcagcctgactggcctgtgcctttgtcctgcttgcaggggaatttgcttctaccttgcagatatcagcatttataaccattccctgcttgacccatattcaagatgtgtggcttctgcgacattttaggaactatttttctgaattgctgtcctggatctaagatatttgtacacaatctgtttggcaaactaactactgctactgttacttccacacttgaatgactaagtagaacagatgatgtacattaattttatgagctctggactgatacttaaacttcattttaatctgcattagctcattttttgcttccaaaacatttattcttctgagaagcaattcttgcccacagccttaataatgtgtagattaggttttgtgagatctcctcctttcttctctgtctctacctctgctctctctaggtgattatttaccctttaactgtaaaataactttggttttcttaattctgaatttttaataaaggaaaaagtataaattacatagaagcatgacaaagaaaaatggactccagatctttgcataaatactgaccttatattttaactaaaatgtgtaaaccaaatttttttaggctatcttggtagcacagatgatggaaaattgtatcaatatcagccattagttggcagaaagaagaaagcaaatatactattactctagggttgccaggtaagattcatttaatatttgaggcatacttatatttaaaaatatatttattgtatatgtggaattcaaattgaacttggtgtccagtatttttatttgctaaatctggtaaccctatattactaggatgtactgcatttgatattaaaaccattctcaaggcttactttgttatcagtcacaacaaaatattaagggctttttttctttcttttttttgcatatttccacatatgcaaaaatgtctaatgcctgtgttgctccttcctgggtttcataaatttctccgctgcctaagaccagcaacctcaaatgttggagaacttttaaatcagttattttccaatgaaaagtatttcagattcaaattgccattcaagtgtttcctgtagctctatactaaagcttaatcgttttcagctctaggtttttagaagtggaaagcatggttttgctaagtacagcaaagagtttctgaggacactgggaattctatacctgcagaaatgtaatatcttcattgaccagtgtgcaggggagccgcaggagtagcaggatcccagactttgatgtcagatgagccttgctgggttcttggcaatggcaacaattaatcaagggaactttggcagtttgtttatctgtcatatagttcttcattcattaaaaattagagatagagagatggaggcatgttagtatgcactttcaataaggcaccaaatgaaaattagttgttgttggataagattttggcgtattatccaatatgttgtttgctcccagtcaagttacctatcttggccacgacagctgaggcagccattgtcttaggaagaaggcagatccccagcagaaacaaaaacagtattgcctccatcgctcaggtctgagtttcaaaatagacaacagtatgctatgctagtaagtgtttagctaataagcaactctttaaaaagaaaaaaggccataatttgtagcacttatgatttctgtgttgtaaacattcccatcatgtctgatttcagcctaccaatgtgacatcactgaactcaaagttgacaggacatgcacacaggccactgggctcggagagtgttattttggaactcccggagttggattttattttttagtcttggaagaagaaagattcaggatataatgtgatacagtttcctgctacccagcagtgcatgcaaatttttcatatgctgataggagaattgtggagtgattcagaggagatcaaactaataagtggcccagcctatatgcccttatgatctgggtgtggtgagataatggaaacctaggtagaaagaaaactccaaacgtcttatcgtgtttcctctttgaatttccttagattagaataattgtgtgccattgttaggcagagaaaaggcctaaggtaagacttctgactctccaagatcttctggtagcatggagaggagctacaaaaactttaagcctccatagctaaagatgcaatattgactggcatgtggatacaactctggaaggcccagagacctctctttttgtatctctttctaaggatcttgctaattttttcagttctctcctctgtgttgtgggagctagagtcctgcaaacagcacttcctagcctgctgtgcctgcagagttcccacttgtattccaccaatgagaagtgcttggtgaggtttgataggtggaacagaagaatatttcattatgtttctgtgcctttgggcagagtgtacgcctcagcagacagcagacatgagacagacccttaagaatcacccatcttagtgctgcaggtagatcccaactatggccagattctactttcagaccttctaatagacacccttgtccagcaactgcctatacacttccagtgatcagaaactcaatagaactagagacagcctcttctacactggacaaatctagctctttttgaaagaaaatgaaacttttgaaaatatttaattatttctaaatatgtctttaaaggtcactttatgcccacatactctgtgtactccttgtatttagttctgggtaagttggaaaggcctattgtgatttattcattgtcattgacttacagcataagttattgtcaaggtttaagaggagtcatccgaaggtttagaattgaagcggcgttcctgtctaggataaatacctgagtttcatcatctcacaccaggaaaatagaggatgcagacacacaagaagtgagtttaagagcagaagctcaataggcaaaagaatgaaaacggagaatagcttcctctcctgcagagtgagacatatggcggggatgtgaagcgggggatcttctggttctgtggcgaaatgcctggggttttatagatgagcttgaagaggcagtatctgatttacataggacccaaagattggttggaccaggtgtaccatttacatagtgtgcaaagctggtcaccccaccctaatcttttattatgcagatggggtctctacctggccggcgccatgttgtctgttccttactgtacacgtggttgtcaagaaaaaggaaagatggagccaccatgttgaacatgcctagtccccaggtagccttttcctattgacacagctgctgacattcacccctgcaaggcttatctatgtctgcagctcagtttcgcaggctgctttttgttagaaaagaaatgatttgggggctgctttttattaaaaggaaaaccttaccaacgactctcttaccctcactatctgcctaaataatttctttttaactccctccaatattttagactaataccatcatttgctccttctttcttatatttagttatgcaatgcttattaaggcattgtgcttacactggggaaccagtagtctcaggctttcaaacaactttcggtctaacgaggagacatacaggtcaactaggacctaaaatacagagaattaagtgttactacaaagctaacacaggtgtattggtaacacatagaaaaggctctcaacttagtcttaagggaatatagaaagcttccttctgtggtcttccagaagtatgggatatgagagaagtgaatagaagttgaatgtagggtgggatgatggagccctcacagttgaaagcacttgttagaaaagggtatgagccaaaaagaatgtagaaccctgagtgaaaaacagcgtacccagcgtggaaagcccctcagtgtctgaagaggccagaggagccactccaccagttcataactcaccacccaaggcccagttgactgaccaaggaaaacaagcgagcaggaaatagatgataggccttggcctacacagagtagttagaggagaagtgaaatttgttgaagagctgaaaaactacaagtgactagaaaaacagcacatagactaccagtaagtttaaattgtggttcgacacagagtaaggtaaagtagcagaaaacaattccaggtaatctgagagtaaatttttttctcaaggtctcccatgtgttaaagaggtcaaattttattagaggcacagatattttatgttgattaattataaatgaattgagaacaaaaaaaatgttatttttttcagccatatcctgtaatattttaaatcattgacccaacaataaataataccattgttcttcagctttttctgactgccaagaaactcagattcgggcaattcattaggaaagaaaagaaaggaaaagaaaaggaaaggaaaggaaaagaaatatacacatatatatattttttgaagttcctattaagtcttttgtttatatacttggtttgccagagctgtacctctttctttatagagcctggggccagcaaggaaggtgccaactttccaacattaagggaggagaactgtaattcctgggtgacaatccaactgattagttcaagaagattactggaattctaagaactgaagaaatgtaggttttctgaccataaaattattttcaacaccagcctaatacactctgtaaagggcattcctccatggctagacaaactgaccaagcaagggaaggatgtagtatggggcgctttcatctatgttaacatagagtgagtgtatcacatgcacttggcttgctcacaaactgaaacatatatatatatatatatatatatatatatatgtatgtatatatgtatgtgtatatataggtatatacacaaatctctgtagtgttcacattgtaaaaagacatccaaaaagggggtttatcatggcaaattcaaaatcatgaatatatgacacactgtgtaacaagctcaagaactttaagtgtaaaaatatcaccctgatgccatttgttccaaagacaacttggagaaagtttgctttagcagacaggacaaccacaaggcgcacactggagagttaggagaagagtatcccctctacattgctgagcccacagcctgacagatgggaagagcaatgaagcactctgaaaagcacaaggtgattttggtggattaggcttatattcccaaagtgcaaataaatataagagttttccattttctcagaagagtctgctatatgcaggactaaacaagtgagatgctctatataggctgacctgaagaccttcctttccaataacacctccttcaactttcttccacagagcccgggctcccttcccaggtcacccctttgtattaacacatttccccatgaagttccttctttaacatgctgacatgtcttgtgaaaattattttttttctataagaataaaggtatataggatacgtgatttatggtccatttttaaaataacgttctcttgagagttagaagttcattcaaagcattatcagcaagattttcttataaattttggacgagtatccaatagtacttgatggattcattttgcattccttggccagaagctctccagtggagcacctgtgctgggactctttttggtgctgtccaattcagcagtgaggccagatgaagtagaagtaaggtctgcaggctggagtttcatccagagaaatcttcttggctgtgaatcagtacaggagcataaggtggggacagtgagggatagtagtaggaatggcaacagaaacaaaaagaggagaaagggtagcttctaggaattgcttaaagagcacaagaagaatgtggaagttaataaaaggaaactattggtggtgacagaagccaatgatgttggaggctcttgttaatggaaagctaccttgagaattgagtataagccctaagctttgcattttttaaaaatggaaagcagccatttcatatttcaagagtgttctcccttaagaaaatgaatggtatacaagctatttctattgtggtctgtgagccacagcttcctaactgtgtaaaagcaacacttggctgaacagtgactacaagaagaaaaaaaactaccacttttacagcacaatgaaaagaacgaaaaaaaaggaaaatttcctttgccatggaatttcctgctggatagaattattcacccatccttttcttctagctgtcatgactagttagggtgtagaacaggtaccacctctctttggtataatgccacactgaattaatccaacttggagtcatggatcatgggagcctagaacctttaagcctgatcagtctgcaaacatccaaaacaagtagtttttcttctcttatttctggtaatatacagagtattttaaggcattatgcccacatttctctgatatgcttgacttttgaagagaaagcaaaaggagttccctcctcaaatataatcttaaagctgctaattcattagccatccagaggttggtaaaaggaatgtccacttattgtttttaaacctgtagactgtagaccatactgaaagcaatggccagcagaagtaacaaatgtcatgaaaataattagtgaatcgttaagtgaaagtagcaattttatgcaattactttaagtagcttaaaaatctttattttcctagcatcacatagagagtttttctaattttatatccaaacactcgtatacactatctaaagaaaataaatgtttaaaaacccccagtaacagaacccaaccagatattgcttaaatcttaacattttgactaggagaatatgtttaaatcccgaagaatggaaaatagcatgcctcagtctgaggaatgctggtgttctttccacggcaggctcacttgggtcaagtgagtgtaattacttctatggagccagtctttgtttaaaggcttgatacttctccattgcctcttggaattgctgaaagctacaatgattcacttgggtacaattataagcattgcttttcagaaagtcttatataaatactacttggaagaaagaaggagaaggaagctgaaaggataaatcagtaatcagaaaaactttctgattttttttttccatcatttgtaattacttgattatggaattataggtaaaaagtcatgtccttctgtcaccattgtccacagcaaaaaccacacaaaaaatataatgatcctagagaaacacttgcacatgcaaacacacacacacacacacatacatacatacatacaaccatgtttttgcaagaaaaagggaagtgagacacacatgatcattcccttggctggatctgatccccctgtaggaacatagatattttgccatgtgcagattttggggaaggatgttggagggactcccttttctcccaacagcaaggtgacatcctgatttgtgttatttccatgtaccctggtgataatcattctgacttatgaaagactactcttggaagactatcagggccacacaagtcaggttctggggccagcagtcaattgttggttgggaaagagccaggttttgagaaaaagagaaattcggtctggattttcctacttttctctgccgccagaatctattgttggaggaaaaatcatgcagatacttcagcctactctctgtagttcttaaaacaaatctccacccgtttctcctttattcaatatgctgtgtggcaaggcaaaattccactggtgccatttaaacataaaagcaaagccacaaaaatttgctgcctcaatttgaattctggaacataaaagagattctcaagttgccttcagatctgtgctgtatgtgaactttgtgctattcgattgctggttatggccaagccctggaactctcttccacagctgagatgtttcctgctgtccccacctccttttctctagtcagtgttcctggttaggtgcaattagaagctcagctgagctagaagtatttcactggactctctaagagtgaactggagggatcccctagagaagtggttctcgaactttagtgttcattagaaccacctggaaggcttattaaaacacacattcttgtgtgcttcactactagagattcttgttgactggaggcaggcggggggaggtggggagctgggaggtggggagcatttttaaaaagttcccaggtgcttatgctgctcagaaggcaacactttgagcagcatctgtctagtgttattcataaacacaaatctaggcaataggagaacacactggttcatgtatccattcatctaacattagtgacatgtcccaagccctctgccaggctctgtgatgcacacctgaataaagcccagagcagtagggagggtgcacaagcttaataatgtgttatgggaagtatacatagaaatatgcacagggaagagtggggtgcaaaagaggggaggctcaaatctctctggatgtgtgagtggggtcaggagctagcatgaaaagtttgaagagaagatcgatgctggactacatcttaaagggaagtccagtgccacagcagggcagcaccataaagagtggcctgagattgtagtagagaatactgcatggagatctgtagtggcatatagcctcagaaataggaagagaggaatggaaaccagatataagacttgaatagtcttcgatagtcaaggcttggttaaaacatgaatcctaaaagaagcaatagaatagaagatagaaataatacaatagtgctagtaggcttaagaacagattgaataaggggagtgaaggaagggagatgatcaatgatgaagatcaggattagtggcgaaagaaaatgagtttgtttctgaacacatcaaattaaggtgcctatggagcatgaagttagacctctctattgcctaattccatctttctagatggacatgcaagctctggagcccaggagagagatttgggctgggattactcaactttgacctatgagcagttgaattctcagaagtgaatgaagctgcccatttgtttatccattcattaaatgtttactgagcacttagtacatgtcaggcacatgtgagaagtatattagtattctgtgatgacaaattatgacaaatttagtggcttaaaacaacacagattgagcatctgcccattgtctaagtcagaaatacaggttggctgggctggtttatctcctgtagagttaacaaggctgacatcaaagtgttgccaaggctgcattcctttctggagtctctaggatgtgtctgtttccaagctcatttaggttttggcagaattcagttccttgaggttgtaggactgaaggtccttggctgtcagccaagctgtagtttccacctacaggctgcctgcagtctttctcactccttcctgaagattcccttcagcaaacctgagtcttcagaaaggaagattccctgtgggctgggtcactctcacgcttcaagtctctctgacttcctttctgctatacctctctgccgcttcctcctctgagacaccactcagtgaattttctctgcttttaaaaagtcatgtgattaaattcagcccacttatgtaattcaggataacctctccatcttaggcccataattttaatcaaatcttcagaggctcttttgctacataaagtaacatactcaaagatccaccaattaaggcacaggcatctttgaaggtcattcttaccatcacaatgaactggaaattctgcatttaacaaaacagacacaatccttgtcttcatttttattttattttattttattttattttgtttctattttgctaactttcattttacattcagaggctacatgtattggtttgttacatggataaattgcatattgctgaggtttggtgtatgaatgatccctcacccaggtacccaataggtagtttttcaacccttgcccttctcccagcctccccctctagtagtcctgagggcccagtgtttactgttcccataaaatttatggagtaggaagatgtttagatagatatgaaatgacaacctaaagaattatataattattaaatatgttgaaatctctaaagattgcaccagactgtaaaaggtacagtgaaaaaaaatggcagcttaactgttttgtagagagaaggaattcttccccaagaacatgaaaagtgatttgagctctgaatgatggatcagcactacatccatgaagaggactgagagaagagcatttcagaaggaagaaacagcatgtacgaatgccttaaggcaaacgtggtacaaataactgaaagaaggcaagacagctggagcagagggaataagggatgtgggacaggagagaggggttgggcatgcaggacaacatggggacacagaaaggctttcagcaaggaaatgccatgttcagactttaatttttagatgactatttagagtgcagtatgaataaggtattgtaggtgccaaaagagctacagtgttagggatgtagttctgtgttcccagaatgaaatgataagagctttaggctaagcatatagtgaaaagggaggaaagtgaataaatttaagagctgtttaagtggtctattttgtcaagattccttggttacatgtaattcgaactttcaaatgagtgaaatgtgaggtgagaacagtattactagctcacaatttccaaccacagaaagaccagggatggcagtgacaagtcacggacacaagggcccagggccctctcaccgtctctctgtgcagtgggttccttgcctctgaatgcagtagaccagtccagtgtgacgactggggcaggggtggagagcatgtcctgccagcaatcccggcatcccatctttacgccagaggagaaagaatcttttaaattttaactccatctagcgataagcaagtgatcaagtctggctaattccctgattagtctaattagtcaagtttgactaattccctggatcatttgtttattcctagaaaaacattaggttagaggtaaggtcctaatctgggagatctagatattttttaaggatatttttcagaaaaaaaaaatgttctgagaaaacagaacagtaagtgctcagtacaaaaagcaaaggcataggtaagatagatatggtacattatagacagggtgcagtccaaagtactttttatagcttgatcatctaaatcagtgattaccgaattatgcttgttttctgtttccatcaataaagttttattgggacacaaccatgtccatttgtttatgtactgtctatgactgctttcacactgtgacagaatagatgagggctgggcacggtggctctcgcctgtaatcccagcactttgggaggccaaggtgggtggatcacgaggtcaggagatcgagaccatcctggctaacacggtgaaacccatctctactaaaaatacaaaaaaattagccgggcgcagtggcgggtgcctgtagtcccagctactcgggaggctgaggcaggagaatggcgtgaacctgggaggcggagcttgcagtgagcctagatcgcgcgccactgcattccagcctgggtgacagagcaagactccgtctcaaaaaaaaaaaaaaaatacaaaaaattagccgggagtgaggtcacacacctgtactcccagcaactcgggaggctgaggcatgagaaccacttgacccaggaggcagaggttgcagtgagccgagatcatgccactgcactccagcctgagtgacagaagaggtgagcagtctcaaccaagatcgtatattccacgaagcctgaaatttttatctccccttttacagaaaaatttgccagttcctgatctagatgaatagttgtgtctttcaagagaaggatcaagtttgaacagaaaagcatacatttggttttggacatgttgagttcaagtgcttttgagacatcaggttgaaacagtgaatacatggttggatatttgaaggtgaatttatttaaaaaagaaacagctttatgagaactttaacaatttctcatgctcctcagaaacaactgattgttctgtagcaacagttagagttaccatcacaaccagttttaaacccacttagtcaattcatgataactttctcagagcaagtttttgaaagctaaccaatgagtaatagtgttcctctttggaaggacaaccagttggcaagagcatgactccagtgaacatactggaaaggcaaccaatccacaagggtcttctcccaagaaatcatgcttctatagctgacatcaacccattctctgaactatttattttctaaaatttccacgtacaatcaatagtctgctttgtttagaaagactgcctaaaaatcataactctcccttgcttcagtaataaatttaactttgtatttcagttagtaagtggtggtttcttccttaaccttagcctgagatattttttttaagtaccttaagtgggccgggcgtggtggctcacacctgtaatcccagtgctttgggagtccgaggcaggcggatcacctgagctcaggagttcacgaccagcctggctaacacggtgaaaccccgtttctactgaaaatacaaaacattagctgggcgtggtggcatgcacctgtaatcccagctactcggaaagctgaggctggagaatcgcttgaacctgggggggcggaggttgcagtgagccaagatggcaccattgtacactagcttgggcaacaagagcaaaactccatcaaaaaaaaaaaaatgtaccttaagtgcgtaggcagttgcggccgtgggagaagtgagttctaagggaaagcatactgagaagtcaagaggggctagagtgtagtcatacgaatgctcacatttaatgactatgtaaagaaggataagactacaaaggaaagagtgaaggaggagccacagagataaaaagaaaatgaagtacatatgttggcatagaaactgaggccagaaactgttttaagaattaaggaacagtcaacaaagtaaaatgtcactgaggccctagttgggataggaaatgaaatatgtctactgcatttggtgaacaagcagaaatttgtgacttttgtgagatttgtttgtgtgcaccaatgagaatgaaattaagatcagaagttgagatgtgagtggagacgagaaaatgggaacaaaatgtataaacagttcttttgcagatagagaaacagatggcttagtgtcaatttgatttttctaagattaaaaaaaaagatggaagaggttcagtaaaaaagagattgaaaatataagagagaaaagatataatcaacagtatggtgcatacgtaggcagtgactggaagagaacagagtgggcagtgaaggagtttggttcaaataaaagcatatgtgcctataaagcaaaacataacaaaaacatggagcaagagtgggtggaaatgtagaatgggctatacattgggtagcataacattggaggaggacaaatttccttctttctttcatctctttggaggaagaaagcaaaattatctcctgagggtgaaaaaccaaataaatgaggtaggttgaagtctgagaaaaattaggacatttagagagagaagagacagagactcaaaaatataacattgagaaaagaggtggggaacagaagaagaacaagaaagctagctgaaaatgattaaagaaaaaggaaagagaaaaactaggagagtggtataacaaaagccaagggatgttgtacaaaaaaacattagatgctagttgcagaggacaaggaagataaaaacagaaaatagtcttatttgacttaagacataggaaattgttggattttccatagagtaaaaccatacatctacttacagtatgttaaaaggtgaattagaagatttcaaattaaacaacgtcatttgaacatatttgtttctgtccctttaataattaatttattaaaattatagtaaataacttaatatctacattatacttaatataatgagagtgaagaagttaaaaataatctacttatctactataagagcaaataacagaaaagacacaacaagagataacagttgctgagacattttaggaagatggaaagcaatgaaggagtaagcagagatgagcacagtaaatagcaactgcctgcaagtgcccaagagaaaaagccatttcaatagagaaccataaaaatattcagaatttagaatcaacaagtcaagatctgggcaaaaagcccatatatggaacaggtagatgatgcaaaattcactatactaagtgatgaagtctccaaacccttttgaccacttgattcctagaataatagggcctagacatttatacaggttgaagaatgagagattttctttcaataaaatgtcagatactgacatctcaaattgctcttcactccaaaggggcaggtcccttcccaatcaatcaccagtaaacacatgtctggccatgccacagagttgagctgactggtgactcatttctttctttcttttttttttttttttttctttgagatggagtctcactcagtcaccaggctggagtgcagtggcgtgaactcggctcactgcaacctccgcctcccaggttcaaatgcttctcctgcctcagcctcccgagtagctgggattataggcacctgccaccacgcccggctaatttttgtattttttagtaaagatggggtttcaccatattggccaggatggtcttgatctcttgacctcatgatccgcccgcctagtcctcccaaagtgctgggattacaggcacgagccactgtgtccagcctggtgacccatttctaaatgtaagtgaataacacaagaccaccagtcatttaaggaacactaacacagcagaaagaggccaaaacaaagagaaaaagaacacacaaaaactagaagcagaaatccttctcattaccacaaacaacatcactagaattaatattcccagagagttaaaaaaatgaaattgatagatatagatatgcattatgcccagaaagaacaacagaattaggaagggagtgctgatgaagcacagttttggagctgagtagctgaacaaatagaagtattggagaacagagtctcaagaatgtcaaggtgggaattaagagaatcttattttacatgattaagcatgtattgctatttgacttttaaatgtttgtgcatacattaactttttatgaatgggaaataataagtgtattagacatgagatatgtgaacaaaggttataaataatctttccaagatctttgttctactctcaaaaccacatgattatatagaaacttactcctgaatgacttttcagtaagcaaaacaactaaggcaaaaataaaaaaaaaattatttgaaacaaatgaaactaaagacagaatgtactttagtacattctgaatgggaacctctagaatggggaaaaagcagtgttaagaggaacgtttatagtgctaaatgcctacttcaaaacgttagaaagatcttaaataaactaatgctgcatctaaagaaactagaattaaagagcgaatgaatcccaaagctaacaaagaaaataaataactaaaatcagagcagaactaaatgaaattgtgacccaaaaacatataaagggtcaataaggtgaaaactttgtttttttaaaggataaatgggaataatagaccagaccactcactagattaacaaagaaaaaaagagagatgatccagataagtataatcagaagaaacaaaggtgacattacaaccaatcttacaaaatataaaatatcctcagagactactatgaacatctctatgcacacatgctatgaaatctagaaaaaactgataaattcctagaaacacacaacctcccaatattgaaccaggaagaaatagaaaccctgaaaacaccattaatgagttaccaaattgaattagtaataaaaaacctaccaaccataaaaagccctaaaccagctaggttcacatccaagttctatcaaatgtaaaaagaagagctggtaccaattctactaaaaatattccaaaaacttgaggaggaaggattcctccctaactaattccacaaaaccaatatcatcttgataccataatctggcaaagacacaactaaaaagaaagctacaggccaatatccctgaagaacatagacacaaaaatcttcaacaaaatattagcaaatcaaattcagccacacatcaaaaagataatccactgtgatcaagtaagctttattccggaatgcaaggatggttcaacatatgcaaatcaataaatgtgattcacctcataaatagaattaaaaacaaaaattgtatgatcatctcagtagatgcagaaaaatgattcaataaaatccaacatctcttcatgttaaaaaccctcaacaaagtatgaatcaaagggaactcttaaaatattaagagtcatctatggcaaacccacaggcaatatcatactgaataggcaaaatgtgaagcattcctcttaagaactggaataagacaaggatatccactctcatcactcctattcagcatagtactggaagtcctagccagagcaatcaggcaagagaaagaaataaaaggcatccaaataagaaaaagaggaaatcaaatcatctcactttgctgaaggtatgattctatatctagaaaaccctaaagattctgccaaaagacccttagacttgataaacaacttcagtaaagtttcaggatacaagatcaacatacaaaaccatacaccaataacattcaagctgataaccaaatcgataatacaataaaatttacaatagctacaaaaaataaaatacatagaaatacatttaaccgaggagatgaaagacctctataagagaactacaaaacactgctgaaagaaatcatagatcacacaaacaagtggaaaaatatttcctgctcataaattggaagaataaaaaattattaaaatgtctatactgttcaaaagtgatctatattctcaatgcaattctatcaaattaccaacatctttcttcacagaattagaaaaaaactattctaaaatttgtatgaaactgaaaggagcccaaattgccaaaacaaacctaagcaaaacgaacaaagccagggacaccacattacctgacttcaagctgtactataaggctacagtaaccaaaacagcatagtacttgtacaaaaataaacaaaaagacgaatgaaacagaaaagagaacccagaaataaagccacatatttacaaccaactgacttttgacaaagtcaacaaaagtaaacaatgggaaaggataccctattcaaaaaatggtgctgctgaacctggctaaccatatgcagaagaatgaaactctatccctacctcttgtcatatacaaatattaactcaagatagattaaagacttaaatctaagacctgaaacaatcaaacttctaggagaaaaactagaaaacattcttctggacattggcctaggcaaataatttaagtctttaaaagcaaatgcaacaaaagcaaaaattggcaattgagacctaattaaactaaaaagcttctgcacatcaaaataaactatcaacatagtagacagacaacctacagaatgggagaaaacatttccagactatgaatctgacaaaggactaatatccagaatctgcaagaaacttaaacaaatcaacaagaaaaaaaatccattaaaaagtgggcaaaggacatgaacagacacttcttaaaaagaagacatataagcagccaacaaacacaaaaaaatgcttatcatcatgaatcatcagaaaaaatgcaaatcaaaatcacaatgagatatcatctcacaacagtcagaatggttattactaaaaagtcaaaaaataacagatattaacaaggtagcaaagaaaagtaatgcttatacactattggtaggtatgtaaattagttgagccactgtagaaagcagttggatatttctcaaagaactaaaaatagatttatcattcaactcagcaatcctattactggatacatacccaaaggaaaataaatcattctacctaaaaaacacctgcagtcatatatttatcacagcactattcacaatagcaaagacgtgggaaccaacctagtgtcttgtcagtggtggactggataaataaaaggtggtgcatatacatgatggaatactatgcagccataagaagaatgaaatcaatcctatactttacagcaacatggatgcagcttgtggccattatcctaagtaaatttatgaaaaaacagaaaaccaaatactgcatgttctcacttataagtgaaagctaaacattagtacatgcagacataaagatagaaacaatagacactggggactccaaaaataggggaggaagggaatggggcaagggttgaagaactatttattgagtgctatattacctatttgggcaatgggatcaatagaagcccaaatttcagcaccacgcaatatacccagataacaaatctgctcatgtaccgctgaatctaaattttttttttagaaaagttgaacatatactaactatatagcccagaaacttcactcctcagtagcttcccaagagaaacaatgactcatcctcattcaaagactaaaatgtagagacattaatcaaagactaaaaggtgaagacaccaatgtttgtagcaattttattcattagttaaaaatgagggaagtccatcaactggggattggataaacatcttgtggcaaacccttcaatggaatactatacagcaatttaaaggaaaagactactgatgcatgcataacataaatgaatctcaaagctcttatgccaagtggaaacatttaggcacaaaagtcacgtgtgattaatgcccagaactggcaaaattattgagacctaaaacagatcagtggtggcctagggctgggaatgggcaataagactgactgctaaggagcaggaagaatgttttggggtgagggaaggaactgaaaaccagattgcagggatggtggctgtgtgactaaaactcatgggactatacacttaaaatgaaaaaaaaaaatatgctatgtaaattatcactcaaaatagatgctttacaaagttaaaaaaaagacctttgttctaaaggaaaaaagagaatatgattctggtaataacaaagatacaggatggtggaaggttttctattttactatttttaataggatatattcgagtgtacttataggttaggaagaagaagaaggagaaagagaatcaaaacgcagacaacagagcaaataatggagaaaatgtggggtgggaacaggacccacaaggcaaattttagaggtggagcttcagcacaagatgctccctcctctgcactgaaagggataacattgatgaagtttttgttgtcttttcagtaaaaaagaagcaaggctacctactgcaagtgacatcagtgatgagcaggtggataggtgagaatgacatttgaaatatccttgtgggttactgagaaagcaagcaagctagttgtgtaaaataactttcaaaccaaaatgaagactcattggagattggaaaccacaatctgtagcaacaatggtctacagagttaaatgattttctccaggggcatttatcagctacattttttgtaagggtataatgaatggctagattgatgctaatttgcaaggccatgaggatgttgaagcaaccaaaaacagaacataaacactgcactctagagaggtgggctatcaaaggaaggaaagagttcactgaagaaaaagagaagggttgaggaattgaattctcagggtatccagaaaacctatgtatagggagcaagggaaaaaaagaaaaaaaacatgcagggataattatggtcagaaattgaaaattgaaatttaggatttcccaacaagtgcccaggtctggagtatgatcctgagagagagtggctcaaggggttgaatggagattgttggagtataataagtcaggaagctttccacatggataacaaagacaaccaggatgattgttcagcctaaaaggagtgaaaagaaagacagtaagtcaggtaccaatgcttgagcaacaatggagtacaacagctacatggaggacctcaaggaagaaatgcttcctaaaggtagaagcaaaaggatctataggtaataaaaggcatcaagacctttgtaaacatttctcaacctccccttgtctcttgactctgctagttatggttacctggccagatcagcaaaagaatcaggtgtcactaaaaagcaagttgaacaagattaagaattgctgctaaacgaaattatcatgagaaatacactggagacggtgcaataaaagaattcaagtcagccacaaaagtgtacctgcccaaatgcctagggccaagacaaaaatcaggatgggcacaacagaaagcaatcaagataccagggccaaatcaaagagagtagctccttttaattccaatttttatgtacatgtatacttaggggagctccctattgaattggctgtgtactacaagcttaatggcgtgataaatagaaagatgcaaagaggcaagaatggatgagcaggggtcgttctgggcaatgtaaagggaccagttcaaagcctgttccagaatgacttggcccactaaccgtggtagagaagaccatttggagtggtcaaagcactggccattgactgctctgctttgcatttgcctgtgagcacagcacagaagtctttgcaatagatggctcatcctcattctcagaatgtttcctgccttactttcttctctaacaacaaatgttcaatgctttccagcccctgttgtgtgttacattagggcaccatgaagacgcttcttgtttattatctctctcctctgtcttcctgctccttattcccctttctttaaaggcagactctttcttggcaatttttttatctccaagcttggagcccctccctatttcctctgcctctttactcctcatatgtacttttaacaaatctatagggtgccttcaaactaagatactttaaaaaataattgctacattcctctaatcttcctgagcacaaattctaggcatcagctgcctgactatacacagaaagttattttagggtgcaaatttgggaccattgtgaaattccagtggccatgcacaggtttcctcacagctttctgatatttaagttttttaggcaggattgtctgaagctgtgtagcttaagggcctttgagtaataattatcatcatggctttacctctaatgcccactgtaagagcaagatcatctgaatctttctttctatagaatagagagcacaaaaataagcaaacttgaagagctgtgatcataaaagctaactaaatactgccatgaaacagctaggatttggatgcagaaacagagtgccagagaaacactaaacaaaatgacaaaccacagttaggatctcaggaattgagaagatggacctgtctggcagctgaaaacattgatgtccatcattaatgcagagtcaggacttcccagagacgaaattcttctgcaggaaaaagggtgcaaccatcagcctctgcccttcctccatgtgagatctctttctcagtctccagggaagcaatgtccttttgcttcctactaaatacctggacctctccatccctatattacccactccagagcaatttgcacagtgctccacactttcccctaattccttctcttcaaattctgtcttggccgggcgcggtggctcacgcctgtaatctcagcactttgggaggctgaggtgggcggatcacctgaggtcaggagttcgagaccagcctgaccaacatagtgaaaccccgtctctactaaaatacaaaaattagccgggcgcagtggcgggcgcctgtaatctcagctacttgggagcctgaggcaggagaatcgcttgaacccaggaggcggaggttgcagtgacccaagatcgcgccattgcactccagcctggcaacagagcgagactgcctcaaaaaaaaaaaaaaaaaaaaaaaaaaaaaaaacaaattctgtcttacgtgcaaacttccaggatttagctgtccgctggatgacgatagatagtgagtggattaataaaagctatactcctagcaaaatgttttgttagatctcagtagcaatgcctcaactgtacaaatgtgcagactttcataattgcccttaagtattcactaatcctggaaatttcaagcaaagtagctatctctctgtgtggagaaaagatgttaagttatttgaggttttcagcatgctgaagtttacattataaaaggaattgctaattccacctacacccttgaaggagggccatccattaacaagagaaagcaataccttagggcaaagtttctgcctatctgcaagggaatataccaattactaagacaactttatcccctacatccaactaagccgtttttgatcttgatccaactccttaatattttaggtaatgcagataaagtcaattttcgactatccatgggtggattatctgcaaatctggattttatcttcttgtgttgatcttgtcatctgttttgtttatctaagccctttaaaagcactattgttgcttctgtttactcttatttcctgcatgcagtaatgataattccctatatttgtttggcattttatggtttgtgaaatattttcacatgcattctctcattttgatgtagcctccgttaatccaaagtaggaaggggagtctttgaaaccatagcattttgtcatcaaattattttcttgggaaggtatatgctaacatgttggaagttgattaagaaacaaaacaaaacatatctgagatcatgttggtcgtttgcacaggcctgcgtggtgccagtgattataccaacatcaaatggggtaaaaggaggagataaccagatagaagatcaccaactgacagttgctcatagcactgttctactgtaaggctcaaatcctagaatatcagccacattcaaaggcaaggccaaactcacatttaagagtgagtttatacctctatgttgatgatcaattgatttttaacacaaacaactaagcaagtcaacaggaacagcgatttttttttctactatggtgctgagacatctgctcttcactgatgtcacttgcagtaggtagccttgcttcttttttactgaaaagacaaccaaaacttcatcaatgttatccctttcagtgcagaggagagagtatcttgtgctgaagctccacctctataatttgccttgtgggtcctgttcccaccccacgttttctccattatttgctctgttgtctgcgttttgatcttctttctccttcttcttcttcctaacctataagtacactcaaatatatcctataaaaaatagtaaaatagaaaaccttccaccatcctgtatctttgttattaccagaatcatattctctttttttcctttagaacaaagatctttttttttaagccaaacatgaacttagacccttacctcctatcacaaacaaaaattacctcagaatagatcagagacctaaatgcattaggtaaagctataaaacttttagaagaaaacatagaataaaatatttaaaaccttgagttagataaaaatttcttagatatgatattatgtctatgatattatgtcaaaagcataatacatacaaaacttgataaatcggctttcactgaaattcaaaacttttctgttttaaaagacactgttaagaaaataaaaacacaagccatagactgagaaaaaaatttacatatcatatatctgataaaaatttatcctcaaaatataaaatgaactcttatagcccagtatacaaggtaaacaaccaattatgaaatgggcagaagactttaataaacattttaccaaagaagatatacaaatgtctaatagcacctgaaaagatgctcaacattattaattattagggagatgcacattaagaccattatgagtaccatttcacctccacaagaatggctatgattttttaaaaagataaataataacaaatgttaataggatgtagagaaacaggagctttatatattagtgatgttatgtaacataaaatggaacagccactttgaaaaactattaacagctcttactgacacatgatcgaaggctggaggtagagaggagagactggaaataaaaggtatcctgtcctccctgtgactgatgctataagagaaggatgataggactcatctgtctatgctcacttggaattccacaaactccctttatacaaccacctagaggaatgggtaccctttagtcttacatttgcatagcttaagggaacaaatttggtggctgttcttggaaaagttgagtttttttcaactacattgacttggcgacttaactctagaaagagtagcctctaacaaccttaaataactaaaaatacaatgcaaaataaactctctgcttgactgaacattctgattctatgataatatctctacctccttagcttcactccaagactttgtttcctaaagttcataggcaaggcttattcttgcagctttacagaaactaagcccaaatgaagagcttctgaaccattccctactctaaacagccattcctgcctgtttgttcggaggagcttacagcctcattggccagagcatccgcgcagggaagggagctatgagcatgaaggatggatgctgtgtcctggctacaggacggcttcagcataattatcctgcctgggactttgcccattatattataatgaattgctttggaggaaaagatcaaatggtggagaaatcctcaagagaaagaatacatctgttaaaaactcccaccaaaaatgttataaagtgtttttgtttactaaatctttcaagtctgaaactggttcaagtataacttagcagcttgttgtgagaaaagagagaaaggaagaccacataatccaccaaaactaattaaaaataatacacacacatagaatggaattatagatgattttgtgcagcataaatgtataaaacatgtttataaatattgatacacatgttaagattgtctctgtgtatgcatttaagacaaaaagattccaaaaatgcataaaagtgttctatacatgagcacatgtgatcccaatttagggttatttctaaaaggttttaattcttggctttgtacttgattgcaagagattcaaatgaacaaatttggtggaagtcctgggaattctctctgctcttcagcaactactctctaattttcagcaattacatttttatcacccattgtgatcctataacgttaaatgtgcattagaaaaggagaggaaaaagcctgtaatttcacaagctttggggatcacaggttgggcacctgctttattacacatacaaggaattgatgctaaattttattcctcgaaatgattctgattacaggtagaatgtaatagaattttctatcctgtgactactcacaggataaaaaatacacatataatacttaccatgaaacaccaaatgtgtatttgctggaagggacatgcagaatacacatacagtactcagcgtgaaacaccaaatgcacatttgctggagttgagaaatcaggctggaatttgtaggacgtagaacaattgctctacaaacccatgaccaagatgactgatcctaaacacgttctcaagaagccacaagagccttcctttcctctcctgtgtcttatccctttcctcctcttgcccccttccccactatgcaaaaagacaaatagttatttagatctcccacaaaagcccaggaaactggacaaagggtgacaggcttggggcaggaagggggaagcccctgccacagagttgcaaataggtctctttttcttgggtttgcatagaaagtcctctgaatgagcttgctgtggcctgccccttaccttctcatagattgttaatataggcagtaggaaaagtacacacagaacggtttagagggagaagggaggactctgggaaatttactaaaaaattaatggatctccgtctggtgcagtaaaggcaattcttgattgtttgcaccaatgcagtgagcagattatcaaggcacagacaaggtttccttagtccgaaacatagagaactccggaggcccttatcaaaaccatttccctcctggtttagcgactggttatggctttaactgcatcatctccatcagcaatggcaggccaagctgctgctaggagcaaaagctaaggctggttttcctgcaaagcagaaatacttgtcatttcacaggggcctggtatctgagtctcattcagccatcttgtttcctgtgaggcccaggctgtatggacctgggcttattactgggcttatttgtgttttggtttgagaataggattgagcgtgtggtaatcagatgatgctctctgcaaaccgcctggggcagagcagctagagttctgagggaagcctccagcttcatccttcgggaactccccttaagtcccgtagctccctccctgctcctacctttggcctgagaattctcatgctgctccttagaattctaaagactcatgatgtctggcactctgctaggctggaccttcacttttgagacggattcaaaggtaaattttgttttgttttgttttgttgatatggagtctcactctgtcgcccaggctggagtgcagtggcgcaatctcggctcaccgcaagctccgcctcaccgcaagctccgcctcaccgcaagctccgcctccctgcaagctccgcctcaccgcaagctccgcctcccgggttcacgccattctgctgcctcagcttcccggatagctgggactacaggtgcccgccaccacgcccggctaacttttgtatttttagtagagacgaggtttcaccttgttagccaggaaggtcttgatttcctgacctcgtgatccgcctgcctcggcctcccaaagtgctgggataaaggcaaatgttttaaccaaaaggagtaactctgtaagggttccatgtgagacactgtggtatcttgtaggtggaaaaaactttatgatatgagaagaataagctgcgaattcttcttcttttcacattaccaaagatacatgttttctctcttattttaataagtcttattttaataataaaattgtaattgcaagccacctctaaagtctatacatgtcttattagtcattttatttatttatttttttaatgctcaaggggttgttttgatacagacacgtgggataccagaatgcctttattttgcagaagaacaaactgaggctggaaacagaactatgcaaaatgatgacttaaaacatgaatacttacatgtttatacgtgtctttttaatagaaaataaatagccattaaaatctaggggaaaattacagagaaattcagaaataaatgaaccagaacatcacccccaggtatttctgctatggagttatcgatgaattttctcccagtcatattgtctatgaatttgttttaatttgtggtgttttgcattcatactatttgcacaattttgtatctttatgtttttaatgttaagaacataaacacatcaattacttgttttcacaacaaagtatttccatgaatgaacatgcctttgtatgctagacagtttcctggatttttaacctttagatgttttctggtgtcacattaatataatactgtgtccaaaatctttttaccttttttgctttaaaaaaaaactagttaaattagtcaaccaatgttctgaagaatattgttagattcaaacttttaaagtatgtttggaagttagttttagatgagttgcttcgaaaatatctacgtttttaccttgctttagtttttttccttatgtaagcatatctagtttacattttcacaaacagatattagaggtgtgttgttttattaactgtttaaaagtctgtccagtatattcaatgaagacatcaatcagaataaaattacaagctaaaaataattctgaaacctttctttataaaatggttatcatgtgtgtcatctatgttgttgtgtttgtaaatacctatgctaagtggatgggcatagctcacccaataactgaaaagattttttgtggggacacaaggacccttcttttaggtacagaaactgcaacaagctatatagtggagctaaacttaggcgtacagcagcctttccaagaatttgtggcacaaagcagacaggaatattctacacacacacacacacacacacacacacacacacacacacacacacacacattccgcttcctgtctctgactttctaacttgaccttacttacttgcaaacttggaaatacaggcattctctctctctctctctcatagagtcatgattctcaaacattaaaatagcttaaaaattaacataccttaatgtcatcttaaagagtgaggaaatatttagcgatcctgtgaacaatttttattttctgtaaacttccccaatcctcacatttaccttcctaggtaactatgtgcttgacttatatattttttctgcattctttgtagccctttctttccccccatggacaactgtgtgtcccagcattacaatacatgtgtggacaaagaagctttctgtccagagagaaattaaacattccagtggcttttctcaccaagtcctgacacagagtgacccttggcatctcatttgtgggcgagcgttgaagatggtggagagataacctgaagcaaatctcagcctgttgttcaggctgccttgggcagtccagagaagaacaacatttagaacatttatgacctgtaaaatttatcctctagagttgagcccacaatttttggccaataattatatgtgagagtaaaatataagggacatatcttggaagcagtattgctgagtacttcagaaatgaatgactattttaatcaacctacctacatttgggcgattatccaaactatttggctttttactcctctccccttccaaacttaccctcctaaaaaatgtttgagagttaataaaatgatgtatttagagctcttaagccctagttcaccttgtttttttttttcttagttaccttcgtgattacttctaattctgccctgaggtgcaaacttgattccattcaaaggaaaaggaaaccaaaacaaacaacaaataaaaagtaactgaggagtgtctccaaaaactactactgaaaacctagtttacctacagttcaaatatgatccactctcgccatctgctggctgtatttttgattttttaaaagggaagtactggcacagacacatgggctaacgttattgtgttttgatgtgttgtgaatatgtgtggggaagctgggcactaaaccgtccaacattcaaattcagtatgtttttgagcacctatatttagctgagtctccctagtttataatttggtggagggttttatacgtagagaatcatcacagtcaagacgaagtagagactgggaccaacggctgcatccgtcagggagaacttctgtcaaagaataacgcacagacactgggtctcagaaagtggctgtctctgaggactcagcgtgtttcttctctttgatgaaactaatgatgactcaactccatggatctaattgtctccctctagaattaccttttctgagtgttcagggctccttgatggttttgggtttgtttgtttgtttgtttgtttgttttttgagatgaagttttgttcttgttgcccaggctggagtgcaatgacgcgatctcggctcactgcaacctctgcctcccggtttcaagtgattctcctgcctcagcctcccgactagctgggattacaggcgcaagccaccatgcctggctaacttttgtatttttagttaagactgggtttcaccacgttggccaggctggtctcgaactcctaacctcaggagatctgcccactttggtctcctaaagtgctgggattacaggcgtgagcaaccgagcccagcctacccagtggttttttctttagacggagtcttgctcttgtcacccaggccagagtgccgtggcacaatcttggcccactgcaacctccacctccccagttcaagcgattctcctgcctcaacctcccaaggagctgggattacaggctctcgccaccacccctggctaatttttttgtatttttttagtagagacggggttttaccatgttcgccaatattctcctcctccaaaaggcgtgcctcagctgacccatcgaggtttccccgaatataacattaaccaacctatttggagtgttttacccaaacacatgtatttaagccacacaataaccctatgaggtagccattattaatcgtgttttatagatgaggaaattgaaatccaaagatattgatgacagaactgctaagtgatagagtcagcacaatgcctggatggaaattcacttccagaaccacatcttcaccacaaacattgctgtcagggctctccaggtaaccctgtttctgtccgtgcagtgtgcagctaacagaattcccttatctcagctgggaaacaggagtgatggaatcatttcccactcccaagtcatcgccacaaaacttctccttcaaaatttgtctccggaatcacttgttcaaaaagccctttgaatttctctttctctctgagtactcagaatatgcctgtcctataaaatttcatttggcggcttgttttcttcgtgcccctctaatattcaccaagattatatttatttgactttactctcagagtgtactttgtgggggggggacaaaagtgattatttttcctctaatgctgtcgtataaatgctatggcaatctagtacctctcatacgtagggatatgcccaggtcttagggaaaactcacttgtacatatctgtgttattgggcctgtgggccaatgatatttctatttcctgttctgcaactttgtgtacaacaataatttaaagtagcttccaaaggataaaaaatgttctctaagaaactgatgaatctatatttacttatgttgccccacatcctgcacattctttttcttcgaattaactttcattttctttctatctttcctttccttcaggttaataacctttgctggtggggttctccagaatcagctgccaaaacagagtctgagtttcaaggtacttattagggatcaagccctgtggaagacacaggggaagctgaactgtgagggcagcccacagaagcctcccctgccctgcagggagctctggagtgaatactgttctgtccaccagagctgggccccagtgggcgaacaagaccaggcctttgcacccccacctcactcagcatcaggctgtgtgggttgtcctaggaaggggtcgactcaaagaagaagacactgaggagatgacagtgggaccatctgccaactctactcccagaagctgggcagtgaggctttccttgctgggattcttggtggagaatctccctattgatcacggtggcatgaattctgcctatagctcacacggtgctctttctttcttacaatccatgtcacacaggctgtgcttttgcatacaaacagggactatctactgatgcacatactttgtcttctcagtaaagaatttaccaaaatacaaaagagctacctcagtgtccataatctgcaggtgaacctgaaactccaagaaactgaccaggaaagagaagcatgggaaattaagagccctacctcttcatttccagaaacatttccatagggctttcaaatgttcctttagttccttgtaaggagtaagagaagggcccgtatttgcatcctcaggaaggggagggtaagtgtctgctttccccaccctgccataagaaaactccctgactctgtgcctgcatcactgcaggtcctctgagacgcagacacctacagggaaatagacgtgtgaacaacgtgttggaaaaaattcctgtgaaggataaacagagcagcagagaaaaacttcagtctacaatggaggttcaatacctgagaaagaccagagggaagaagggggaccgagcgagcctgacagcacaacatagctctgggaaagccttggccaggctgacgcacagttccaacatagagatggtccattagagggagtcgtgggataatccaattctatttcccttactaggctcagtaataatctggagacagcccaggaatcgtgcatcctctgtatgaatgctgttgtgggtcctaaaggtgcagcagcagctggatactgtcaggtgatagacatgaaaggttattttcagaaggagacatgagcagtgtattcctgggactgctacaatatgcttagtattcagcaccaaatcctcaagaatgggttcatagttgtctctggtcaggctaccatataaaaaaaatgccatagacagggtggtttaaacaacattgatttctcacagttatgaaggctgggaattccaagatcaaggcactaacacacttgctgtccagtgaggagctgcttgttggtgttcagatgtccgtctttctcttttttgctttctctctcttttttttttttttttttttcttgagatggaatcttaccctgtcacccaggctggagtgcagtggcatgatctcggctcactgcaacctccgcctcccaggttcaagcaattctccctgcctcagccttccaagtagctgggattacaggctcccaccaccacacccagctaatttttgtatttttttttttttagtagatacattgtttctccatgttggtcaggctagtcttgaactcctgacctcaggtgatccacccgccttggcatcccaaagtgctgggattacaagtgtaagccaccacacccaggctgttcatctttctcattgtatcctcacatagcagagagcagagagacagaaagcaagtgttctggtgtctgtttacaaggacagcaatcccattcatgaaggcttcacccttatgacctaatcaccttccgaaggctctgcctcctaatattatcgtatttttggttaggatttcaacatattaattttaagagaatacaaacattcagtccatagcaatagttgacttaaaagaacacattaagaaagttttttttttttaatttctctttcatacctgcttaattcctgatcctaaagaagggtctccaaacacactcctcaaattgataactgatacaattgaaacttaaatcaacagatcaataaagaaatagcatcttttttttttctttttttttgagatggagttttgcttttattgcccaggctggaatgcaatggtgcaatctcagctcactgcaacctccacctcctgggctcaggagatcctcctgcctcagcctcctgagtagctggaaccacagaggcacaccaccaggcctagctaattttaaaaattatttttagaaatggggttttcctatatttctcaggctggtttcaaactcctgggctcaacagaccctcccgcctcccaaagggcttagataacaggtgtgagccaccgtgcccagcagaaatagcatcttaaccactggaattagttaagcatttttaaccactgtgactctagtgagaactcagcaccacctcaattacataaaattacaaaattgtttaatgtataccgactatgggccagatacgctgctggatcagccaaaccaagttaaatcaggcgaaatcttgacaggcctctagggtttgacatccttgataaatgaaggataatatcttgtttgcggatttttgtgcttccaaacatttctatcttttcatttagtatgttaccataatatttctatctctctttttgtttttgtcaaagcaatatccataggtcaggacactgaaataatgcatataatgcataaaatcttgtgatgaaaagatgccatcttctgccttcattccattcttaaagtaactgtttctaagcttcttcttctaaagtgattatttctgtccatttctgtggtactctttttggtatttcattcaattctctaaatactatgtttctactaatgtctccggaactatctactatctcttgcctctttgctatgttgaatttcactaacatgctaccaatctgttagtaatgcaaagctgtattaactaaacatttgagcagttttcaaaaataccaccttgagagagttttaggattatcgcaggggaaaagtcagaatgtatctctctagggtcttgggatctacaccagagtggtttaagcaatcgagattgggcattaattgtgacattgtgagacgaagttcttaaaatgattctgggtaagaaatttttgtttgataagcaaaatgttttcccagctgagccaatgagccaacttttgtctcaaaataattgatctgctggaatttcctgaaggcagtagtaaagttaattattgatgattaatcttacctttctcaggcaaagtttctctggtacaaacaactatgtcatgttgacaaaggttgccgtgggtttttggccttaatagctaggtaatgttgatgcaggtggttgtggttctcagctccatgggtatttagcccgtgtatctcccactactatcttcctttttcacctcttctctgtagttatatccctgtttttaattcaccttgtggttatattcagcaacttgaaatagctttcatcactctgccttttttattctagcagttttggcccttgactgtcactctgtaagatgagttattaagacctctacttttctacttttcttccccctttcttcctgccaatttctgtcagctgggctgtgtgccaaggtgtaaaacatttgcgttatgcttttaaccataattacattttctgagctgtcactaatgattgagtcaacaacttgaaaataacaagttgtatttacatgaatgtaataagaatgatacatttctacaaacatttgactgtgtgttgagcacacatttaagttctctctgcatattaattgatttcaacctaatactagacactattattagctcaatttcacaaatgaggaaactggggcacagagaggtttagtatcttgcccccagtggtttgctgcctactcttttaaaataccatgccttcattctctaccctagaacaggcaccctcattctgccatgcctccaatttgttcatttcacagggatttttcttaccctgagccatcccagaggctgttctcagtgttttttgaacttcttctcccaactttacctcaacagttcctacttaccatgctgatatcagctaatatcagttcctcagagagatcttctctaacagggtatcagaagtttcttcttcttcttcttctttttttttttttttttttgacagagtctcgctctgttatccaggctggagtgcaatggcacaatctcggcgcactgcaacctcctgggttcaagtgattctcctgcctcagcctcccaagtagctgggattataggcgcccaccaccacacccaactaatttttgtatctttagtagggacggtgtttcaccatgttggtcaggctggtcttgaactcgaggcaggtgatccacccatcttggaccaaagtgctgggattataggcgtgagccactgcgcccagtcagaggttcttctattgtctctctcatagcttccattatgttatttcctggaagtcagcgtaatttgcaaatacataatcctttttgtgtgtatcagtatactgcctctttttccttcttgacaatgagatgcatgatgtcttgttcactctagtatgctcatagcctaggatagtgttggcacttaggaagtaatcaattttcttcacaagtaatggcctataaaggctcataaacgtaatttcactttctagttaaatacaaggctattatcatgaaaatactattggtcattcagtgaagaatggtggaataaatttgcataaaatctaacacctacaatagaaatcaatttttaatgcaactagacattcatttgctttcctgaaatttgactcacagaagcataataaataaaggacaggtgaataagcctctggaccatggagcagagcaataataatcatccacatttgtaaaggtcttggcactttgaaatgccttcacaatgcactttattccattaatccctcccagtgacattattatgtcatcaaatacgttattcaggattgcacaaacaacacgtggcgggaagaaaacacggtttttcttttctatgtccagtgttcttactcagaccttcccaccttcccctttctaaatacaaattctgaagcagcattctctgaaggacggtctttcctttgacaatggaattgtttttatgttaccatcagtcattttgccttgtctgtagtatttaaaacattctcatttcaacaatagtaactttgatctcttagtcaggtatttgataaagaacaaataaattattcaaacaacatcatgtttagtggtgagcaaaatcctttcaggagatttagccaatatctggaagaagcttcactgaagaggaattggagtggagccttgatgtcacactagaaagcttagatgagggagcagctgagtttctaaatctgcttcatgatactttcactgaggagctttggcactcatgcacactcttaggaaactaccacagtagatagttacagtgtgtttatattttaggacattgatttactcactcattgatgcatttcataaagagctgtataaaaaggattttatttcttaagagattcaaactctttgaatctacctttgcacttattatcaccctgtatatgagattgtgttcaataactacagttttgctgctgcatttcctggttgattttggacttgggctacaacaactcgttgtaataaactttgaaattctgtcttaggccacatttcctagaagtagaatctgagatgggaatttgagtataaatgatttcttgtggggagggctcttgagaaatggagtgatgggagcaaatggaacagagggtggaactcagcaaggatgtgtgctcagcaggaaagcttcagctgatgccagagaaagcccaggagaactcactgtaccataaagacagtcccacctgaggcaagggggctggccttttgcacatccttgcaagtcactctttggctactggttactggggggagaagaggacagctgtgagccatcaacagccaacaatctcagcatttggggggcatggatgcacagcccagtacagggaactggacttcaacatcaacaaaacctgttactctgtccacgtaagtgcaggcattcatccttaaaaatgtgagaaatccacttacttctctaaaacatcaaccatcaccttcagaatgacatagcactataattataaatctaataagtataagctaagtttaggataagcatcttcacccatgtttgagtgacagtaagtcacgtatgtgtcaatgcattcttacacaaattgccccatatatttttaaacgttcaagttggcgtatctctcctcccatttcattcaggtatcacatagtttttgtagtacactgaagcagattattatacagggataagcatttgggagttccaaagaaacgtgagagcatatgcaattgtaggaagctgaggaggaaaatggcccaaattaagaccatccagttatccccagtcatgagagcacagagtttatttgagataaaatgagagattcgattaggaaatgaaggcagagactcgatcatgacaggccttgagtaatataaaaatacatttactattatcttaagaaaaataagtgctaggttccttggctaaccttacaaattaccataaactaggtggcttgaaacaacaataatttattctcttatagtactggggattagaagtttgcaatcaaggtatcagcagggctgcactccctccagagactctaagagagaatccctcccttgcctcttccaacttctgatgactgtgggcaatccctggctgtgactgcatccctctcagctctgtcttcacattgccttcactgggaatctgtctctccctgtctctctcttataaagatagttgtgatggtatttacgatccaccccaataacctaagataatcttctcatctcaaaatgcttaacttaatgacgtctgcaaagaccctttttccaagggtcccatgcacggatttcaggatggggatgtagatatatctttgggagccattatcggcctaccatggtggaaaatgtataaaattatttaaatcaaaggctcagtatgatcaaatttatgttttagagaaaaaaatactccacaagcattatagaatatgaattagatggagttaatactaaggtgaggaaaccttacaggaggtctggtcaatcgttcagatgattagtggtgagaaattgtatgaagacataggtcttgaagaaggagaaatgtggccaagatataattggcagcatgaagggacaggttactatatgggtgagagagatctaggagccaacgatgattcccaggcttctagactgtgcaactgcaggacgatcttttgttcactgaggctggtcatatacggaggaggagcagacctggcgaaaaaggattatagcttccattttggccaaggtacaggaagtatgcagtagaagagggagacaaaccagtgtggtcataactgatctgtccagaagatggctctcacacattttctttgtttccagtttccaacttagttggaaaaataattgctaatttacaatgaaccaacacattgacacatgactgaaatgtttctctatagagtgataaatacatgtcctaaaatgtagaaattatttcctatttttcctccctagggtttcaggacattgcatctgggtgccaaaattctacattaaacaatcagagagggagtcatattgtacacgtagtgcacatctgtattgatccttggcagcctacttacgatttttggatggttgaattgcggtgtgactgtaagataagcaagtggagatgtctaagacacacccaagtgtttggtacctgccaatgtcatctaaagacatttttaaacaatgcacattccattataggaactcaaaagacactagaacccctgatacatattttgaagagtttaaggagataaaacaaaacaaaacaatacaaaaagtaccttctgttcccctccataatttcaactgaggaaaaaggcgtagggatcaattggataaaaatcaaaatattgcttctattaccaataaagctggatttgataacataatttatatgtgaattaacagactttctaataattctctgaagtatactccttgggacaacccaaaaaccaaaagagagtttgggtcttgaagagaacacactggaatctccttggaacatgagtgacatgtgttcccctcccagctttcatgtgttttgcttggaactcccagcacatgtggctcttctgtagggaagttccctgggttgctgggacactttgcctggtcatacagaggcagaagtacccgaagcaacgtttgatcaatgacagagagggaagaaataaaagcccagcttcctcagatccagaacaactttgagatggaactcacagtccctagtacccctgtggccacttccttgcttgggactctactcttgcttgacttccttctatgtctgtcctgcttctcctcctctcttcctgtctcccctaggtgccttacctatgtaaattgtgtgtgtacgccttcctatcttagggtttacttctgaggaacccaacccaactctgagctgtagaatggatgcagttcctcagagtgttgcttcaactttggcacctatagacagctccactttttcatgctaggcctttcaattccaaagccttccagatgtcatttctaaactggcaagatttccaccctttcaagctgtgtgcattctcttttggaaatcatgaaaacatcacagatggccttatgatataaataattagtgaagaagacaattattgctcatctgtgatgaatcaagcttctttttatttagtcagcaacaagctggacatagtcattacatagccctagggtctacgcagccacacagattataagtttgtcctgtatttttgcctcatggggtcatgtgctaaatatttatatgaaatgtcactatcatatactctcagactatcaatttctatgttaatatttttcttggcaattgctctgcaggcaaaactacagcctatatgtgtaatagcttcacatgtcagtacttttcttaatgtctcataaaaagaaattgttcctctgacaatttaactaagatacccaaaagagccaaacaagtctttcaacatcctctttaatgacttcttgttgtttttattcagttttatgaaaacatctaatttcatcactctctctgacttttattgatttaagctggcatgattaccctttataactcaataagttggcttcagaagtacacacagtcatatgtcacttaacaacaagaatacattctgcaaaatatatagttaggcagtttcatcattgtgtgaacatcataaaatgtacttacataaacctggatgtataacctatgacacacctaggctatatggtagagtatattgctcttaggctacaaacctgtgcaacatgttacgtactgaatactgtaggcaattgtaacataatggtaaacatttgtgtatctaaacatatccaaatatagaaaaggtacagtaagaacaccgtattataatcttatgggaccactatcatatgtgtggtccattgttgacctaaacttcattatgcagttcatgactatacataaagattttcttaggtaggatgatcaatagagagcaaactggactaggagtcagagaatccagctatctttttgtatctgctttaaattgtttaacgaccaagacaaaattaccaaacttttaactttgtttaatcaacttttgagaaaatgatttttacattatgatttccaacatctactttagttccaaagttttctgactctgggagctttaatcatacctcattggaccaaatacacatctgcctttgaaaaaagattactaattagcatttacattaatcaaagtgtgatccttgaattagcaatatcaacatcagctgggcatttattagaaatacaaattataggccccatcctagatctactgaatcagaaactctagggatggggctcagcaatttgttacctgtcaaagtttgagacccattgatttatacaagtcaaaaacaatcgtcatggtaacaggaactgagttttaccgacaagagccagtagtcctccaaattactcaatgtggtttgccaatggccacccaagagcttttgattcagtatatttggaacagcttccaggaatctatgttttaaacaaacaatagagaaaatttcaaggaccaactttagacagtgattacctaaagacagtaactgagttgctggtctgccctcctggcaggtgtcacagagtgagtactctagacctaattaatggaggaaggaaaaaaaggatggggaggagataaacagagcaagagacagagatgcatgtcatgtcagtgtcatttcctcaaggctgggaagtctagaacagtatcagtgctcccatttgttgcatgtgattactacaatatcaactcttactggaacaaactacaaagagtccttgagaacaaacgtcctgagtattttttatgttcagtcaatccttggtatccatgttttctgcatccccagattcaactaactgtacattgagaatactctgggaaaaagaaaatagaaaataacaatacaacaattaaaaaacaatacaaataaaaaatactgtatgacaactatttgcataagatttacattgtattagattattataagtagcctagagatttaaagtatacaagagggtgtatataggttacatgcaaacgtgatctcattttatttaaaaatattgagtatgcataggttttgatatctgcagggtcctggaacaaatcccccacagataccatgagatgtctgtatttttgcttaagtgacaagatgaaacaaggcaacactataacatcctactcactatggagcaaaggataggctatattgggtatataaacaagataagggtcaacgaaaaaaagtgtataagcctctattctccctcatctcacagaaagggacactattcctgagaatagctactgcacatgcagtaggtttgcattttaagagaggaacactgttcacctcatttctgctactctatcttcttatagtacaagtgtgaaagtgcacatataattgagaagaaaaaaattggaatttactcaagaaagtatatgaatttacagaatgtgatagttttcaaatatgttcactaattgtcattccactttttttccttcaacttttattttaactcaggggtacgtgtgcaggatgtgcaggttttttacataggtaaacgtgagccatggtggtttgtaacacagttcatcctcatcctgttagctgggtattaagcccagcctctattagctattcttcctgctgttctccctccccccacctcccaacaggccctagtgagtgttgttccccctcatgtgtccatgtgttctcataattcagctcccacttataagtgagaacacacagtatttctgcatcagtctgctgcagataactccatccatgtccctgcaaaggacataatctcattcctttttatggctgcatagtgttccatggtgtatatgtactacattttctttattcagcctatcatcaatgggcatttaggttgattccaagtctttcctactgtggctatatcactcccctttttttttcttttttttttttgagacggagtctcactctgtcgcccaggctggagagcagtggcgatctcggctcactgcaagctccgcctcctggcttcacaccattctcctgcctcagcctccggagtagttgggactacagatgcccgccaccacgcctggctaattttttgtatttttagtagagacggggtttcactgtattagccaggatggtctcgatctcctgacctcgtgatccacccaaagtgctgggactacaggcgtgagccactgtgcctggccgtcactccgctttttaaaatgtgaaacttaagatccctcttttttaatttccaggcttagtggcccactcctataaaatagaatgtggtggatgattgcagaaattaggtcacagaaagcatttccttctgtgaaatacttctgtgaaaggcttgattgcttctgcagagatttttcacccatttggggatgccagctccgatactgtgggaaaatgcaggcagtctgtgggaagtttcttatggagaggtactgaggccacctgccaacaatcaggcacaacctgccatccatgtgaatcagccactttggaagtggatcttccagcttcagtcagtcttcagataactaataacaagccttcagatgaactaatatctatgacttctaggaaagatgaccacttgcctccgaaaacctttgcacagttgcagcaagtgggaggactccacaggaagcgctagaggttagatgtgggcaagctctgccgctggagtacaggcagtgcctggtcctgccaagccattgtcaggcagtcagaaagagctcccaggatcattctaaaaatcttgcttatcacttcacatatagcaagcttcagtcccaaggcaaacactaccaaaccctactactttgccttgaaaccacctgaacgtggcatatggtctgaaaagaaaagagaataaataggaaattttaggaatttatactgtggctgattctcttgtctctttaattatagaggtattttatatatcatgtttgaagttgtttaaagcaacaagctacaaatggaagtaaacaatcaagccttagtcactcaaaggcatcacttgcattgttcacagcaacttcttggcaaggacatgccatgctagtggctcatcagtgatgggatagagcacaagccatctgagcatggaagatccacaagataggatgggcatccacgaatgtatccagagcagtggaaaattctctagaaatcagcaatggtgacgcctttgattgacaacagctgttcaacagcacaaagcaaaaacgaaaacaaaaaacaaataatctgatcaaaaaataggcagaagatctgaatagacattctcaaaagaagacagacaaatggctaacagatgtagaaaaatatactcaatatcactaatcatcagggaaatgccagtcaaaaccacagtgagatatcctttcatcccatttagaatggctattatcaaaaaaacaaaaaataccaaatattggtgagtatatgagatctcctcttatacactgttgaaaaaataatcagtatcactaatcatcagggaaatgcaaatcaaaaccacattgagatatcatctcatcccagttagaatgactattatcaaaaagacaaaaaaaaaataccaaatgatggtgactatgtgcagaactcctcttatacactgttggtaggaatgcaaactagttcagccattatttaaaacagtattggaggctcctcagaaaaattgcaagtaaaactatcgtatgatccaataatctcacactgggtatctattcaaagaaaatgaaatcagtatgtccaaagagataactgcatttccatgtttattgcagcagtgtttacaatagccaggatatggaatcaatcaataacaaataaattttaaatttcatatgtatacacaatgaaatattattcaatcatgaaaagaatgaaattctgtcatttgcaatagcatgggtgaacctagaagacattatgttaagtgaaataagccaaacacagacagaaaaatactgcatgatctcattcatatgttgaatctaaaaaagttgatcatgtaaaagtagagagtagaatagtccttactagaagctgagaacagtacggaggagaaggaatgaagagacgttggtcagtgggtacaaaattacagttaggaggaataagttctggtgttctattgcacagcagtgtgactgtagttaaccataatgtattgcatatttcaaaatatctagaagagaggattttgaatgttctcactaaaaagaaatgacaagtatttgagatgatggaagtactaatttccatgatttaattattacataatgtatgcattattgaaacttcgtgatgtaccttataaatatgtacagttatgtatcaattaaaaacaaaataaaacaaaaataaacaactgtcattttgaacgtggcaatgggagacttcaacatagcaattcagaagataagatcaataatcaatgcaatttcagccattgtgcttccctgagccttcagagtagctgagcaagtcctgaggagggtggagtcctgagctggttgactctagtgagaaccaaccacttttatgtaccccaaaccacaggtgtgtttggtatctgttaggataagctgggtaacacttttcaatattaacagagattaaaactttattgtttatttcttgattgtgacatattggctgagcattctggtccacatcattggctttcacagatgcaagcttataaatcctccaccaccttgcacattgctaattgctacagcacaggttaggaaacttgacaaaccaggcaatggctctgaaagcttcagcctagaagtaacatactttcaatggctaaagtaagggacatgtgaggcctacctttaggagaacagaggatacaatacttcaatgtgtgcagaaggagaaaaactagaaatattgaccagcatgaatgattaccatgcctataaatgttgacattttctatgtgatataaaaaaagcctaggaagctctggtctgtatcccttgataagaataagcaacaatttccaaaatatactagtcatcagatggtaccgcctgggtgatgggatataattttaaaatgttttcaatgtggggtgggcaaatagagatatataagaatatctcttatatatgtacttataagaataagtacatatcttggcctttactgatgtggccaaataaaaacaaaactcattgactatctacaatgaccacttacatacttctttgtatcttttttatcacatttaggtaaagtaaaacatatcagcttgtaggcaataagtagtttagacatcatagttagggataaaacactttttcttccctcctctggtttccatgaaggggtattttccctgaacacacctcaacccttgcccaactcctcactcagggaaatcaggatgacttatcagaatctgagcttggaatgaagactggttgtgcatagctcagccacctcccttctcttctaccttatagccagattgcctgcataaaataacagtccaatattcttctccggaatctcctggagattttacactgatatatctgcaattgggaaacttgtgatggttgagatgcctatggctgagtttgaaatgtgattttgtggttcaataataggatgtccccttgtttctggatatttagaacaatctattattatctgaagtcctcttcatatttggattcctatttttttcaatttcttagactatctctgaatgagtttccagctagggtgagcaatagtaagactcttatttactggatatcctcaacaattcctctccccacaaacaccaatactgaattccaagcagctcagaacatttctgaaatcactgttataaagatatttcattgattttgatcagtaataaaccatttattgatctactatttcctacacatgaggcaagaaacaaagtataagacatgagcccacctcataaagaattggtaatatgggatgtctctccttgtaaaaaagctgcaatttcatcaaccaaaatgaaagcatcacatttttttatttcctgtaactgattctttttgttctataattcaaatttttgccagtgcaaacagagacttcccatttgacaataatgtatttccttgattaaacagtctttacccttttattaatggggttatttgttttttgcttggtgatttaagtactttatagattctggatagtaggcctttgttggatgtgtagtttgcaaatattttctcccattctgtaggttttctgtttactctgttaatagcttcttttgcagtgtaaaaactctttagtttaattaggacccacttgtcaatttttgtttttgttgaaattgctactggagacttagccaaaaatcctttgccaaggccaacactgagaagagtattttctaggttttcttctaggatttttatttggccaacaaacatatgaaaaagtgctcagtatcactaatcatccagagaaatgaaaatcaaaaccacaatgagatatcatctcacaacagtcagaataactattattaaaaagttaaaaaaaataacagatgctggcgaggctgcagagaaaaaagaactattatacactgttgctgggaatgtaaattagtttagcctctgtggaaagcaatttggagatttctcaaataacttaaaactgaactcccatttgacctagaatgccatttcttggtatatagcaaaacaaaaataaatcattctatcaaaaagacacaggcacacatatgttcatcaccacaccgttcacaacagcaaagacatggaatcaacctaggagctcatcaacagtggactggataaagcgaatgtggtacatatacacaatggaatactagaatgaaataatgtcctttgcagcagcatgtatgcagcgggggcccttatcctaagcaaattaatgcaggaaccaaacactgaatactacgttttcacttttaagtgggagctaaacattgagcacatgtggacataaagatgggaataacagacactggggactactaaagggaggaggaagggaggtgggcatgatttggaaaactgcctattgggtactatgcttactacttaggtgatcagatccctactccaaacttcagcattgtgcaatatacccatgtagcaaacctgcacatttaccccctaaatctaaaataaaagttgaaattattttaaaaaatttttaaaaagaatctttagtcttttccatggtaacattctatgaacttaatgtccgcagcccctatgactttcatttcccccttctttcctaagatggcttttcagtatagaaaaagattctgtgtgtagttcatatactcttctgtgggttatcctgtggtccatatactcttgtgtggatcatcagaagcctcttctgagttgttgttttcctgcctggtacagtctggggattgggaatggttccatagcacctaccaccgtcaaccataaatattaccatttgcctttcatcataaagatggtgcattttgcagccacaccaatcttcttttcaatgccacaccaatcttcaggttttggggatggtgaatggccatcaactcagaaaagtcaacatggattaacctcaagatctcactgcaggtatgatgctaaattcatgtggtccaggatatcctttgtatgaagtttctcaagactgcaggtcttctgaaaatccccatgctttctcactttaccaaactcttctttttcaatgtattcatggtaaattcattcataccaaaatataacaattatgttcaatagtttttcattatgcaaattactttccaaaaataatcactgccgttattttggtaccatcttttcagatacctttactggctctttatttattcaagaaatagtatttattgcctgaaaggggtggcaaagacagagttgagtttttgaaaaatcaaatgagtttctggttggaactttatttttcatagattgtgaagatatagtattgaaagtggagatattggattgtgagagccatgtttttgagagaaaagtagaccttttgagttttaagcctggttttgaatattaagagctaaggaggctggaggactcagaggacaagattgataccagaagcagtagcacagggaagaacgcacaagactgtcaaagtaatttctggggatagatttagtgtaaattgttgtgggagcaatgagaactgagaaaagtaagtaagagttgggtgttgataagaatatttgagagagctttgagcttttcccgaccaatggtgggattttgcactggaccagaactcagctaatttctcagctcatataggactccactggtgcccacccagatccccttcacctgcagaggccccatcccacagctgctccaagttttgtttgcttaggcccttagctagcccctcctcagagaattgccttcacccaataggaattgcctctcctgcgatagcacacttctccacctgtgcttccaagaagcagcctacagccaatgattgaccgatgaaggatacttaagcccagcccccttgcctggaggtgaaagaagtctgtggtgctattcactttccacagcgactcttggaatcgcaacgaggctggactttagctaaaaccacaccacttttttttctaagttctttcacttctcctcattgcttctctcactccctcatagtaacacttcagggttattataaattcaaaaaattaactttattcctctgtaactaaatttggctttgcatcagtttctactgttatcagaaaacctaatcttgctcaaagtaaattcagtcacttctggtttaaatttcattaggattccacttccatctctgttcctccctgttctgagattggagaatggcgctattggatataaacttttgttggcttatattttcttccatggacccacttgggaagcagtacagaagtactgtaccacacagggagtcgggtgcctgtgatttgatggtgcactgcttctcatatgccttggggcagaatgggttgaaggtggcttagccccaacacaaattcaccctttatcttctgaatccctgagtgtcacccagattccattccattaataatggctaagttacatgagtttcccagtcagcctctacccatcaaaagcattcctatctctcttcccacctctctgtcgcctggaataaaaatgcttgtttaaaattggaaatttttgatttatgaaaatctatttctttggctctgcttgaaaatgcacgaaagataatctcatgtatttgcatcaaacgctccatcttttttctttatgagatctcttgctcatcttcaggtaaaaatttttgattgctttttttttattggtgtggaaaatagaaaagggagacatgttttccacactgtcaggtttcaaagctcttagttatgctagtcagtcatagaaataaacagctttaaactattttcatgcatatttatatccacacagcaaaaaatacaagtcaaggaagtgttttctgtgtgaatgtcaagtgaattaattaatagcttcctagatattggcgaaatttcatttgactctttattaaaggttgtaaatggatcccctgttatagtattgcattggatcgtgatgatgaatcgtcagcaaaatgcctgactggaccctgggattaggggactggaaaattgacaggagtttcaatactgtatctcaatgccttctcgggtagctgttcaggaaagcaaggcaaatctttgcttttgtcttgggttgtttggttttctattgttttaattattaaataaatcagagggacagaacttaaaaaggaaataagcagtgggcccttgtgtgcccaccaacaaacttaggttataaagttttaaatattcatccctcatcccatttcccaaatgtttttcttcttccaaagaagctaccagcttgtgatgtttatcacgtctactcattggtaataattctacttgtgtatgtatcaatcagtaacatacaggattctattttatgcttttaaccttaaatggtatctacatatggtgtttccttcaacattataatatttagttgtgtttttttaattcacactactagatccagcactcatatccacttctgtatagtgtttcatcataagatgaatccatcctcttcttaaaatattttttatttttaatttttatgaatacatagtaagtgtatatatttgtggaatacatgagatactttgatacaggcatgcaatgcataataatcatatcagggcaagtaaggtatccatcacctcaagcatttatcatttctttgtgttacaaacaatccaatcatatactttcagtcatttctaaatgtacaataaattgttaactatagtcctcctgttgtgatatcaattatgaccttatttattctatctaactatatttttatatccattaaccatcccccgcacccctcactacccttcccaacctctggtaagctttattgagttcaattgctttaatgtttagctcccacaaatgaatgagaacatgcaaaatttgtctttctgtacctgacttatttcacttaatataatgtcatctagtcccatccatgttgcaaatgacaggatattattcttttttatgactaaatagtactccattgtatatacatacattttctttatccattcatctgtcgatggacacttagattgcttgcaaatcttgactattgtgagtagtgcttcaataaacgtgggagtgcagatatctcttcaatgtactgatttcctttcttttgggtatacctagcagtgggattgctgagtcatatgatagttctagttttagttttttgaggaacctccaaactgttctccatagtggttgtattaatttacatttccatgaatggtatatgagggttttcttttttccacattgtctccagcatttgttgttggctgtttttggataaaagccattttaactggggtaagatgatatctcattgtagttttcatctgcatttctctgatgatcaatgatgttgagcatcttttcacacatctggttgccatttatacatcttcttttgaaaaatatctattcatgtattctgtccagttttaaatcagattattagctttttttctcttgagttgtttgagtgccttatatattattcgtattaattcctcatcagataatttgcaaatattttctcccattctgtgggctgtctgttcactttattgattatttgttgtgcagaagctttttaacttaatgtgatcccatttttctacttctgcttttgttgcctgtgttttggggttattactcaaaaagtctttgtccatgccaacatccggagagtttcccccaatgttttcttttagtcttaatagttttatagtttgaagtcttagctttcagtatttaatccattttaactttacttttgtatatgttgatagatacggttctagtttcattcttctgcatatggatattcagctttcccagcactatttattgaagagactgtcctttccccaaggtatgttcttggcacccttatcaaaaaagagtttgctgtaaatgtatggatttattgctgggttctctatctgttccatcagtctatgtgtctccttttatgccagtactatgcttttttgtgtactatagctctgtagtataattcgaattcaggtaatatgactcctctcgttttgttctttttgctcaaaatggctttagctattctgggtcttttgtggttgcacatacattttaggattttttttttctacttctgtgaggaatgtcattggtattttgataggaattgtattgaatctgtagattactgtgggtagtatggatatcttaacaacattgattcttccaatccatgaacataaaatatttttctattttttgtattgctttcagtgtctttcatcattgttttatactttacattgtagagatctttcaactctttggttgagtttattgccaattttttttttttggagctattgtcaagggattgcttctttatttctttttcagattgttcattgttggtatatataaatgctactaatttttgtatgttgattttatatcgtgcaattttactaaatttgtgtatcagttctaaggtttttttggtggagtctttggtttattccaaatataagatggtattatttgcaaacaaggataatttgacttctttctttcaaatttggatgccctttattttattctcttgcctgattgctctagctaagacatcaagatttattctctcaatgattacattgaggctgtttccattttttggtactgtaaataatgcatgaatgataatttcacatctctctccttatgtttattggcaatattctttccagaatacgtattgtcaattttactagttactgccaaagttttccaaaatgatggcaccaatttattccatcacaattagtgtaggagactctcatcattccatcttcttagcaaaatttgttgtacactactttttactgaattaatgggtatgaaattgttttttatatctgttttaatttcaatttcttggattatacctaatgttaggcaacttttcatatatttattgggcattactttcttcttgcttgggaattgcttgtttatatattttcataatgcttaatttaattttcttctgagttgtcaacatttatatatctattatatatatctttgtagtaagtctgataatttatattcattcaaatattgtcttgatctgtggcttacattttactttgtgcagagtatctcatgaagcatttatctgtttttatttatgaagtttttatttattgtatcagttatatattgccttataacaaatcactctaaaaatcagtagcatagattatttgtttgctccattctgtggattggcagtgtgggcagaaatcatccctgctctctgtggctttggctggtctcactcgtatttatggtcatgtggcaggtctgctggggaacagctggtcccagatggcctcactcatatgtctagctgttggctggaacatttagatgaggtacctttgttctcctccacgtggtacctccccctgattggctaaggctttcctctctcttagcaaggtggttgccagagggtggcggtgcaagcttcatgtctcttgaggcctagcttggaagtcgcccacatcagtcccactgcttttgatttctcaaagcagccgcaaggccagcccagattcaagatgtagtaaagctacagattccctctgcatctggatgggcaaagcatcaacatcacactgtaaaaggagatatgccagaatagaaagaatttaaaatgtaacttagtcatacttaaaaggtatgtatcaatgttttactttaaattctgtatcttttgtatcttgaataaaaattcccccactctaatttcataaagatattactttttttttctaaatttattagagttttattttttacatttagggcatttaatccagctgaaattgatttctgtgtatgatgtgaactaatctcatgttttcttcatgaataacaagctttgtcagtagcattcattgactgttccatcattgcagtgctggtttgcaatggcacttctgtcatatttaacaataacattgattaagcagaatccatgaggcaccagcaggtaagaactttataattttcttccaatgtgctttcaaacacattcacttccctacctgagtttggaatcagctatggaaatatcaagaactgaagcagatagatgtcaaaatatcagccttcttgctagataaaagcaggattaaaggacatgacctacatgtttaacatcaatgggcttgttaaccctgaggtcccaaatcgacctgccaacctgcccagagctgtgctgaacagtcacattaactctgaaggaaaattgcaatgtactctcctgctggactgggtgtactaacaactgaatggaaacggtgtgagagacaaaaaatgtctggagaaaagtttaatgcttgagtataaacaagaaaataatgagactttctaagattttatccaagggacaggttaacttcattctgccctacattattggtaccactgtaactaataatcacaacagctaaccatttcgaacaccttaccatgtggcaggtacattaaaagcttttaaccatcaagtaaaatgtatagggtgtattagtccaggtgctttaaggagaagacactaaaacaagattaggtgtgcaagagatttactaggggaaattgctgtgaaggaaaattaggaagagttacaggaggctgggagagccatcagactccaggtaaagaaaggaggaaagaactgaagatttcatgaagagtctttgcagtgtccatgctaaggtatttttccaaagctaatgtggagtctatcactgctatgtgaccacaaatgtagtggcttaaaagaaaacaaatgtattatcttacagttctgaggtcagaatttctaaaatcaaggcactggtgaggttacacatcttttaggggcttagagaatccctttccttgccttttccagagtctaggagccacctgcattctttggcgtgtagcttctccattctcaactccacccctccccgcaccatctctgacctctgcatctgtgatcacatctcctttttctgattctgaccctcttgcctccctcttagaaggactcttgtgaccattttgggccaaccgaggtaatccaaagtaatcttcctatttcaagatccttaacttattcacatctgcaaaattccttttgccatataaatagtaacaggtccaggggattaagacataggcatctttcagaaaccattattttgtttgccacagaatcttcaagctaaaaattactcatcagagaagcccatgaaatgggcttcctttaacatccctgctgttctcacttgtctgggagcagctcaggggaggtgatgcccccactgaaaacacaatcagaaaactgggaggctgattttcatgaccaccacaagaggttagcagaggaaacaaagacatactgagggtgagtaacttatgtacgaatacagagccagtggaataatctctctttctctcccacatgctccttttctcctggtctttctctctctcaatctcttggtcccctctttgtctatatcttaatctctgacttttttgtttttgaattttctgttttggagcctgaacacagtgattgcttttcgatggtgttataaaacttgccaagttttctctgattctagtaactagtttgccaaatgggaaattatcaaaaataatctaaaattatgaggaagtagaataaagtccctccatagacctgatttgcctcctttcaccaagagaatgttacagattggatggatatggaataaacactgttggtcctgtatcaatggctagagtttaatttgaatataatagtgaattatgcttaatgacattaaaaattggccaggaacggtggctcatgcctgtaatctcagcagtttgggaggccaaagtgagtggatcactaggtcaggagctcaagaccagtctggccaagatggtgaaagcctgtctctacaaaaaatacaaaaaattagctgggcatggtggcaggtgcctataatcccagctactagggaggctgaggcagagaactgcttgaacccgggaggcggaggttgcagtgagttgagattgcaccactgcactccaacctgtgtgacagagcaaaaccccatctcaaaaaaaaaaaaaaaaaaaaaattaacaactaaaatcttggtaaccaggtagccctggcctgttcctcagtagctccctgagtgcaccacagacaaggagctttgaaattctactccaaacaccagagagcacacatcttcgaatgcagtactggggactcttcaagggtcaatatgtatgggcatcaaaaatatgttggttcctaacccaaatgcccatcaatgacagactggataaagaaaatgtggcacacatacaccatggaatactatgtagccataaaaaagaatgagttcatgtcctttgcagggacatggatgaagctggaaaccatcaaaataacacaggaacgaaaaaccaaacaccacatgttctcacatataagtgggagttgaacaatgagaacacatggacacagggaggggaacatcacacactggggcctgtcagggtgtggcgggggaggggagggagagcattaggacaaataactaatgcatgcagggcttaaaatctagatgatgagttgatgggtgcagcaagcaaccatggcacatgtatacctacataacaaacctgcccgttccgcacatgtatcccagaacttaaagtataattttaaaaaaaatgttggttccagaagaatttgactttgacatcagatattgaatataaataaacctacttacatgctatatcgtagtaaatatattcattctattaagcctaaatggttgtatactagcatgacatcaatgctagtgattatttgtcataattctaaagaagaaattattagaattctaaataatagctgtatatgaagccatttcctcccaagaattcagggagtttctaaagtaaagcctcagacagacaaatccaaatcaaaaaactttccctccttcatcactagagaaagactaagaggatagtttgtcaagaaaagactctacggagagataaaatgctgaaagttatgaacatatggtacccaagggttgaacatttttaaaaaatggccttaccattaagaaaattggcaggagaccttaccatattattacactatactttctaatattttcttcttccagattaaactctaaccaataatacaaaggtgttttatttcatatccatcctttcaataaaaatctccacaaaatttaaacatggtagccagttacgtatctaactcattagacacattgccgttccacatagtgaaaaatgatatttttggatgtttatttcatttcagaaggagagaaatctcagaatcccaatggccccattttggtctttttttttgcaaagttccaaagtaatgaatcagtagaaatgtttgtaaagatactaaaaggttgatttcccattttaaataagtacctctattataaaaagatagagatttcaaaaaatacaaattaggagagaaaaatcaatttcatttctgggaaaatctgcagtgtgtttctcatgagaaaacaacaaaatatggattttggctttcctcctctttattctccacagggatgcaatttatttctttacccccaagacctttctcccctttgatgttcttgctgtctgacctcgacctttccagatggaaggattgcctgaggcctgaaaagattctattttccagttgaggctgcagcatctgcccttctttcttaaaccatcaatgaggctagagtgagaagaggaaggagaggcgctgtcggtggcattcatctttaccctacatggctcatgcttttttttttttttttttttttggtacacgcaaattgctcctttagaacctgaagctgaaaaaaacatttttttaaaggggtgtgctgagttttacaaaagctattgctttgcttcatgtaccatttactctcagggctgaacaacattcattaacaaatatatcctgtgccacttttcatgcagtgattttttttactagttatttcagtctgatctcctatgtcatgctggagatacatcagaaagaaacttccggtcacaaatgttgctgacctcaaataaggaattaagaaacctaaatttaaactatttggtgaatgcaaaatttgattctcaaaatgaaaggctatgtgatttttatatcagagtgatcaatatatattatcttatatttttaaaatatttattttgacatatacttatctgatccattatataactgaaaaatctcttgggacaatatatcatatattaatatttattgtaactgcaatagtaataataatagcaactaacactgagcacttaacatggaaagaacatggtattatgtacattatatgaattccctttttaaatccttttagcaattctatgaggtaaatactgtgatgctgcttattttacaggttaataactgacacaaaggagataaacttgcccaaggtctcccattttgtaaatggtagagtggaagttgacatcagatctttctttccaggtactaaaccattattttatacaactctaaagaatgttattgaatttcttcacagacattcacagaaagtttatgcaaggagagggactatactaatggtaaccaaaaagaacatgttcacagtctgttcagatatgtgccaatctttctgtactcctcggtcaaacatacaacaatgtttctgccatggatgatcaatttcaggtcctatgatatcccaatagcagagcaaagtcaaagaaacctgacttattactaagaatatcactgagtgctcttcagtctctttcagctcagggcttttcaaacattagcacatgtaagaattatctagagagcttattaaaaaacacattcctgggcatcagccttatatattctcattcaacaggtcttgggtagaaccaagaatgaatttctctactccagaaccagttgaggctgatgctactacacagtctcactttgaataacactggtctagtggataacaataactttctacctgtaagttcagttttgccaaagatggagggtctagatctttagtagacatcactagaaagcttgcttgaagtgaaagctgcagaacgccaacaccagaaattcttgtttatctgatagtttatgggagaaactttgagaataagtgctggtctctaaatcggtgaatgagaagctttgatgtataggtgaagcgttcctgctttttccaacgagggtctagaaaatgtctgaagttatattacctcctgtctcataagcttgatatttagtcctctagttatatcctcatctttatgactcaacaaatatttacttcatgtccacatgtaccagatattgttcaaggcaaaaagcaaaacaaaacaaaacaggaaatgtccatgcacacatcaacttacaattctcttcccaatttccactcaggaaaccccagttagccagggaactgcaaacctctaccctcctgcctgcaacccctttccctagtatagatcatagggttagctcccttgacatcaaccacagggcattatgctatgatgtaggcatcccacctgaggacaaagattgtcctgcctagaagtcatagtctcatctcccactctcttacaagtgttgaccccttggaaacagagttcattaggcctccttggacctgatgatttggaatcctgccccttcagatggtaaccactcccttataaaaggttaattccaagcagtcagcccttcattcccatcaagcattcccagcgtgagccttgacaactatggcaatctcagaccatataacctcacctgactcttcagattcctgctgtggtagaactgattctgtttcaagtggtaaacgactgggggaccagtaattgcaggaagcagtgtgagaaagagtagaaagaagttatgctttacagagcatcagaactactacctgaatttaccacttaatatctgtgtgattgtacacaagtttaatgtctccatgtctcattttccccatccagtagaattgctctgatcattgatgagaccaagttggtaaagtccctagcacagtgcttgctataaaatagggatggaaatgattggtcactatggtaatgttattgcaaaagtaacccagtattcctcctttccctgtgtccatgctcctgtgcaatgtcacctgcagttcctccattaagaagccaaatctacttctccaactcttgagtctgggcaggtctccaacttgacttggccaacagaatgtggcaaatgtggcataagccagtttcaggccttggtctcaagaagtcctgtgtgttctgctcattctctgggattcctgtccgtattgccatatcaatatgaataagcccaaaatatgaataaagcccaaaatatgaataagcccaaaatagcctggtggatgatacagacctcatgaagcccacttgtcttgtccaagtcctcaggtatatgagtgagcccaagtgaaactgcaaattgaccttattgatttgcagctgaaaacagaggcatgagccagcccagctgaaatcagctaactgggcctctaccagcaggaccaccaagccaacctataaactattgaaaaataataaatggttattgtactaagccataaaattttagggtggtttcttatatagcattatggtcgacatagataaacttcactgttcttttccccaattccttcaaatattttgttcaatgttatacatcaaaaatcaaaactaaaaacttctgtgtcccttttaactcctttctctccctgtatcccaacacaaagccagtcagtcaccaaccgaaaatgacttggattcaagtgtcctgcagatctcctggcaaattttcttccctgggaaagaaagctcttccccattcgtttttccagagaagccagttacatgaaaagttcctaataccagtttatatccagcctgcctcgtgggttggacaattacctggaacagaacttcttctgggtcagatcacacaatagcaatggtttcctacttctcactgaagctgcaaaggtctttggacacaatgttgttcagtactaagccccttattttgttttattttgttttgtttagttttgtttttaaccagctttctcaggttgaggaaggcccctgtttctgaactggaccctgtctcatgcagaggacttggtctctatcccgcccttgtctatttcttcctcctgtcatgcccagtagcctgacatcatgactgtgctctttaccactatatcactaacactggttcattgaaagtacttttaaaacgtgtgtttgatgggaaaataaataaaaactggataaattaatattcttcccactgaaaacatctttctccccttttccatctattaaaatcaaacaatttatgtaaaaggcagcttaagtaacaatcacaatgtattatttgcacctctccaggtgcagattacttttctgcgtttttaatagtttattgtctatctgtctgatccttgaaatatatgggttagtgcaattaaaatatcgcaaaacctgcaattacttttacaccaacctgtagtataaatgctgaatcatattctcaaatgaaaattgttccatgttgaattggagccatagtatagaaacgtctcttaactctaggccgggcacggtggctcacccctgtaatcccagcactttgggaggccgagatgggtggatcacgaggtcaggagatcaagaacatcctggctaacatggtgaaaccccgtctctactgaaaatacaaaaaattagccgggcttggtggcgggcgcctgtagtcccagctactccggaggctgaggcaggagaatggcatgaacccggaaggcggagcttgcagtgagccgagattgtgccactgcactccagcctgggccacagagcgagactccgtctccaaaaaaaaaaaaagaaaaaagaaaaaaaaaagaaatgtctcttagttctaaacaaggaggaataaatataaaaggctaactaaccttaatattcaaagcaccacaaggagcttggagatgtactgagcaaaaagaatgaaaagatgcctcagtctgctgtatacaatataatgctgtgtaacaaactatcccaaatttagtggcttacaagacacatttatttcctgtttatatgtcttcaggtcagctgagatttggctgatctaagctgggctcaaccaagcttagattcaagctgcagtttgggtccagatcttaactatagctctcatccttcttagaccagtagtttccagaggcaggctttcctcatgataaaaggcaggagcacaagaagtcgagttcaaccatatatcacatttaaagctactttatgcaacatatccactaatgttccattggccaaagcacttcacatggtaaagctcaacataaatgagttgaagtatactctgcctactctaattggaggaactacagaggtacaaagagtgtgactctgggaagtgttcaatagtggagaacacaaatataacacctgtggttggaaacttaatgaatgacaaatagaagtattttgagcttactagaactaagacaagtaattcaattccaaattgctgtttcctcactgaatatacatgaatctttcattttatatacattataggctaaaggtcactagaaaagaaatgtggtattataaataagccaatcactagtatgcatttttagatgacaacacaggacatacatttctaccctcttttcttctgttcagctgaattataaccttcaaaaagactatttaatttggaaatggcactagtaactagaaacagctttgatattaatttattattgatagaaaatttctgtttgtgcatgaattttctgctttcagaattgcctctgagatcaaaaagagtctttgttttgtttaagaaaaatacattattggttaacataccatatagtatagataatcttataaacacataggaggtatgaatttgctgctactatgattcaaagtcaaagaaatgtcacatttctttatgctcgttcagtcatattaaatctaacttcaagtctgggaggaaattgagtcttagtcattattaggtgctatcccatgatttcccattgaccttacctgattccctcttcctccactctgcaatgccttgaattataccagggatgtcaagcagaacagaaccctttgggaagacatgttgatcatcttccagctagcctaacaacccctgaagcctcagagctctgcagttttcaaggcatcttcagacaagaatcctcatgaagcatggcatttcatcaccactctatccaacttcctagaattaccacagaactatctttttgaggtcctgatgacttttggagcatctgagacaggaagggaatattgggttactacttcttgctagaccagcatattagaccagcatataaccttccactcttgttataacttcttttccctccacttatttatgattctcatatttgacaatcactcatctcccttccctccaaataaaataaaggtctaccttcttggaagtgcctcacgtaatcttattgagatttagcttttgaaagatcaaacaagaaaagggattttcttaaagatatttgcttttggctctaaggcaaaaattttaactgagtcagaggaataaagaggttgggttgggtggggtgcattgggttgggatggggagtggtggaaacagagaatagaaatcacgaatagccctcagtctactgcttattacatagcaggagattcaaaacacaaattaataaacctataattttcctgccacaaagctatttattttattatcattttatgtcagcttcagaatgaaattattcccatttcttccatgccatattattctattcagtagcatagttaattagaggacttcattaatatggagacatgcttacttaattagttacaatatatatttctattgtctatatatttttccttttagcaattgcagtctaaagggtagagttcagaaattaattttagcagcttctgggaaaccctgtacataacaaaaactaaaatgtcaatatgccataagaggatacttcacagcttttcaatttattttaatataaactagtgggcactaacaaattaaagcacatgtatcttcttgaaataactggatttgttgtagaggaaaattttactctaattcattcttgcaatcacttgctaatattttatgcttatttctttcattactgtaatccgatatatgaagttctgagaagttttcttcatcggtcaaacaaagaattaagcttttttcaatagtattctatgtcagtcactaattaaaatttatttaggactcataatgtacctttatagaagatacatatatgagttcaattaagtgaagaactgcatgtttttgtaacttcatttatgatcaatcatataaagcaacataagatacggttatttccatgtatccacagcaaaacaaaacagtcgactagagcttataaaattcattctttcaaaaagtacttctttagcccttactatgttctcaggtaaacattttaaaacaacaagataatacatattatgggacaaaactgctatgtaatttcatttgtattaattcaaacaaagctgagatataaaataatgtattttaactacaaaatgaatagacgtactgctatgtccatctttaaatgcaattaaaaaccctcttcttattctttacgaaccaatcaatcagttatttccaaatcttcttgattagattaaattttattaaatgtgtgccactgtattaaattctaggaatacagccaataacaaagcagtcatggtccctgccttcaggatacttatagtctttaaattatatgtgaatacaaactaataaagtacaaataccagaatatgtaattcaaacatagttatctcattttaaaatatccaccatggaattttatattggggatacttacctcctttgggatttctttcagagttaaattatgctgaaccaaaaacaatactgcccaatgaaatgccacagcacgctgcccagatttttgcattagttaggtaagtagcccattttagcaattcagccttccaaaaagtctctcatgccatcaatcccaaaaggaatgtctgattgaatggcaggcttgcatgcccattcagggcccaattctcttctgtcttcctctattctgcctctagagtgttaaatgggaaagacagagcacagaggattgtgggaggtttccatggtccaggccaagaagtactgcagttactgctggtcacatctctttcaccagatgcaatcacgtgactgcaactgactgcaagagaggctgggaaatgtagtctaaggttgagtccagaggaaagaggaaatggttttggggagcacatagcacttctgtgtcacaacttgtgtctggatgcattttagccgttcctggggaaagaaagaaacaaacaaaaaaataaacaacaacataaaacctgcttttaaagaatatttattctatggaaagttattaaaaactatgtcacaaccttcttaattagctcttttctagttaatttgatattttaaaaaattattttcagttcatttacatctatagaagagttacagaaatagcacagagagttattgtacatcctgtacccagcttcctctaatgtttaaatcttacataaccatagtacacatagaaaaaaactaagaaattaacatcggcacaatgttattatagatttcaccacatatttttgacttacgtcttttcttctgttccaggtatttctatctacttttaactcacacatacacacacacacacatgaacacatccctaaggctttatttcttctttgagtttcctaatttctagagtaaaagacatttttccattctcataagtaatcattattcaaatatcattggttttccaaaagtgaaatcttacatagactataaccattgccaggagtgtggcagtcatcagaggaaagatgctaacacatggtaataatgataagaataacgacataattgaggtctactgagctgttactacatctggcaagtgctagtatgactcacttaattcttgaagaagttgtatgagaaacaaattattttaaccctcttttcctggtaaggaaactgaggctccaagaagttacacaattcatcggtcccacagctagtgaggaaagagcctaggttcacttcagtccattttaaccacaaaacttcaagggaaaactgaaactaataaggacaaaagcatatccaaggcatttctggatggggttatatccaagcattcacaagaagtatccattagaaggagcatttagaggtaggtttttgaggacaaaaagaacaaaaaatgagcctaatgatttaactttttgcctttattcctagtagttcagcatttacctaggacaacaatccttcttccctctcagttgtcaggggtcacataggaattaaactggttgcaagagcaagagctgaggttctgagccttggtactttctgaacttagcatttccgaccttgagtcatgtttgccacctgtggccctttctgatctttgcaaatccgatttctctagtcagcctagttttgagacctaattacttggcatttcacctctgacggtctctgcgcaggcctgaatgttaagccctgtgattctagcaataagatgcccctgtgtctgccagtgagtccaggctccttgcatgagtaccatctgagatccatcttagaaaaaatatattccattagtgcaatcattcccaaaatgtgagccttgggctaccaacatcagcatcacctgggaacttgtcacaaatgcagatcctcagggtcttcatgccagccctactgaatcagaaattctaggcaacagggaacatcaatctgtgttttaacaaacccactatgattttgatggatgctaaaatttgaaattcctgaattagtatctgtgtctcctcatttgctatgatgcccattggtacaatggattaagacagggaggacttagtgtctgacagctcagcaacttagctggttgcatgcccctgggtccttgctcagcctctgtgcttttccattttctcatttttaaaaatacaccaaagagctataatcgagctctcgtttttctgtgtttgctgatgagtaactaatggagggttgtgctatcccatgttaatcttaactgcctgactaatgcttagcaatggcttttgtacaaaggttgtccttgtgatttctgaacctcttctcctgcttggatttaagcagcaatatcccatcacatttgtattacataaatcattggggcatgggttgaatgttatatactcataactatgtgtaattaaacttaatatggatttgaccattagttaaactctcacgctttgagattagctataattgaggaaggcatgacctttattctaacagggtagaactttctcttggagcatttaaggttaaggtatgagaggactttgctgttatacaaaaatattccacataggaagttcaagtaaaatactaaacctttctaggccagagttctttaagaaattaatccagataaaaccatgagatagagataattgccacagaaattagcaatcctgccaaaagaactgaccatgcataggctgatcttttaggaacacggaagggaccttaaaaatgtcacatggaaaccactctttgggagttgttttttggatcagaacagaaattaagaagctagatagaaaaaattcatgaagatgagtgtcttagtttgaattccccagaagcagattctgagtaagaattttagtgcaagtgctttatttgggatgtgatcccagacaatactagcaggaggggagcagaaattgagacaggacagagaatgaaggcaacacagtgtgtattatcaagcaagttatcactatcagcaattgaagtgtagggtcagagtttctgaatacaagtctaggataggctctgtggcttatcaactcagcccttgaagaattataccacttctttacgcattacatccttcttcaaagaaatgaagataaaaatgctctccaaatgggatgatgcggttgctattgataataaatggctaccttttattgaatactgatcctgtaccaggttcagtgttaatctttactccaaatcctaggagataggtaaatgttcttcaaattttactaagagatcatatcaattatatacatatatatgtattatataaatatatatatttaacttttaagttcggggtacatgtgccggtatgttatataagtaaacttgtaccatgagggtttcttgcacagattatatcatcactcaggtattaagcctagtacccattacttattttttctgatcctctccctcctcctatgtttcaccctctgataggccccagtgtgtgttgttcccctctatgtgttcatatattagcatcatttagctcccacttataagtgagaaaatgtggtatttagttttttgtttctgtgttaccaactatataattttataaacataaggggctttgcaaactgtaaggtgatgttaaagagaacttgttgcagcttttcttgagtcaatggaaagtccatacttaagttataattttgcaactcattagccatgaggcttcaaccagataactttgcctctttcagtctgcctcctatattaaaaagtacataagccagatgctaatattaggcattaggggaggctggatacatgggacagaggtctctgctgggtatttctttgcaaattcttataaatctgtaattatttaaaaataaaagttaaataatcatagttgggctggtggaaatataaattggtctaaccaatttagaaaattggtataatttatgaaagccaaacatatgcatacatgtagcccagaaactacagtcctaaatagatacacaacagaaatacaagcatacgagcaccaaaagctatgtactagaatgttcatagcaagataatgtgtgacagtaaaaaatgcaaacaacacaagtggctatgaactgtagaactgaataagttgtgatttactcatgtattgaaatattatgaagtgatgaaaatgaataatcttcaagaatacatgacaaggatgaataatattacagatgtgatagtcagtgtgacaaacgtcatacaaaagagaacagtataattctatttagaaaaagttcccaagaagcaagatatgtctatgctattggaaggcaggatgtctgggagggcagtgactgaaagaacacaagaggtgggcttctaggaaactgagagttttctgttctcgttctgggtgctggttacatgggtacactcatggagcaattaaattattatctgtgtacttttccataagtactttgtattttttaaaagtttacctaataaaagcactatgagttgggttagatgactccaaaagattcttctagctctaaaatcctgatcatgagatgaggctctgccatcttcccatatctattgagatgaggctgggagttgagttggtccacttgccaacatgaggtcaacacactggctctgtttagttctgcaacacgaggatgcccctttgcatggcacagttcattttcctctcgctggtactcagcacagagatttatacaaacaggtactcagcagacacatgttcaaagattttagatcatgcaattttagaaacttccacagggtggcaaggacgctattacttgatagtctttacacacataacaacctttctcctcttttttgtccccctcagtctctttcacaacatacaggtttccctatccatggctattataaatattggaaaatacagttttatagactatactatttctaatgaatgctccatattacaattaaattagaggactaatctgaagcttgagtagactaaataaaatagtgggtagggggaaatcagtgttgtaccagagaatataatttctgaaacataagaaaattagcacagaacatgaccaaggggaggaattacagcaaaatgagttgcaaggtaatggaataaagatgacataatattatttgccccctttaaaaaaggtcctgggcatttgataagcacaaaatgaattcagatagacaatagccagaaggtggtagattgtttgcaaaataattgctgcaattatttccttccacatatctgcatcattttgcaatgtggtttttcaaaaactcccattaaggggtggagctatttccctacctgttgaatttaggttggtcttttgacctatttactagaaagtaacaaagtaattatcttctacttttaaacttaagactaaggagtccttgcacagttctgctttttctctttgaccatagcctctgccacgtgaacaagcctgagctggcctgttagaagatgagaagccaggtggaacagtcattcccattgtcccagccaagcacctcctagcctttaacctacccagcagcagaccagagatacctaagcaaggcttgccaagagcagccgaacctcacccacatcagtagagccacccaacatgactgataaacttgttagcaaaaaattttttttaaaagataattgtttaagtcatgaagtttcatgtggtttgttaggcagcagtggctaactcacggccatataaaaatatcaattgcactagcttattttctgctaaacttccttttagatgcagctttgtatgcagtgagagcctcagcctgaaagtcaagaactttggattcaaacttttgtaacagtaaaaaaatgagagatcttgaaaaatcgcctttgaagtgcttttttatcaacctatctacctatcaatcagtcatctatctatctgtgtgtgggtatattaatcttgtaatgggtgcacgtgtatgtgtttaatgtaaacacacgaagaatggtcagtgtcttcggttaagttttcccagcagcaggccccaagacaagcatccaagtgcaagtagtttatttgggatgggaccccaggaccttttaggaagttgggaagtgacaaagggaaaggaagacaaccatgagactgcattaacaaataggttaccattgtgaataattcgatttttatcttcctggggaactccagaaaacagtttaaaatttaaattttaaaccttaaatttatcctatccaggggtaagggagctggaatatttatcctaccaatcccagatattactggttgcgagttgatcatgaagggaatttttttcccagtacttcccatcacatgcatggacaaagtgggctctggtagccaaagaaagtcctcaggcaaagagaaaggagtgcggaacagtggaaagttgggtaagaatggtaaggcccaataggaagcagcagagcactggcagcatctgccagcaacactgtatcttaaacctgggacatgctagatgtacaattaacctttgtatacaaacatttttctattttagaactttattgcttacaatctttagtatataaaatgggttctattttcactctctgaatgagaattcaagggagaattctacctcctctgtagagctcatcttatgcaattttatctacattctccatcaataaagagatcaatagataaataaatacagacatatatacataagatagatgagagtgtgttctttattcttcaataacgatctacgttttacaaatcacaatgtctgaatttatcatattgaaactataattatacttaggggtctcttttctgctgattttttagttctgtaagtatttatgtaattccagtatgatccctgacatatattaagcatttgtgaatgttgactgcctaaccaatggaatgcactgatgggtactcaccaaatgctagtagaaaatcataaatataatttacatataccctatgtggttgaatgtctcagcaggcatgttatatgctccacgaagataaagattctatttgtattgtttacttttataccctaatgccaaacaaaatgattctagcaaagtagaaactagaaaaatacttgttaaataaaagaaaaattgtttgaagtctaaaaacattactgagaatttaaaaatagcaaaaataaattacttacatctttctgtatattctgttgcactggacacattcaatttgcattaagcacacaagatagcagaattttagatgacttctgtacaattcatagattacctatacctaattgcaaacttcatttgagaaaaaagttgatggtcctcttgtttgaagaattttatttctgttatgaagtttcactgtgggatcccaaatacaataaaataagtcaaagcatttttgtggtcatggaaaataatgtatagctgattgttcattattaaactgcaacatatattgaatgttatcatgtttcaaggctattttataattagtaagtttttgcaaaataaaaatcctagaattttatttttcacacctgcactcttcagagttcagcttcatccatatacctctttctacagtgaggtgcattggttgaactaggaaatgcagagattactctcaattaccagttattactgagttgctgtgaaaacattcaaaaaatgttgagattattatcaaagacgcaggccagaaaaaataaaaaactgtataggaccaggaagagctgtattcacactaatgtcagagttcactgtacaaatgtcttaatttgtcattataaaatgaatctggaaataccgaacaaatcaaaaaagatctgttgtgacgtggtgattttttttttgaaagctacataccaccagagagcttctgtcatccaagttattccaagacagttttctattcttgccatggctatgaatgacagcttaatataacgtgtgtggaggggaaaaaaaagaagaaattcttactcagactcagggcttccaagtgtctaataacaatcctaaaaaacaactgcatcttcaaataactcttaaactctaacttatggtttagcattcatctttactcaagtactagtagatgagatgaattcaattatatcaaaggtgtggcatcctatggaaaatcaaagacatgctgggctgctaccatttagaaattgatttctcatgaggaacctttacctctttgtctgtcatcatgaaactgtcccttaccagtattgatagcatttaaccctctggatgaggaaaacacttgaaataaaaaataaaactgggtagcccataagctgctattatctctaaaaggaactgacattttaggattgatgctagacataaaaatattttatttgtgctatttttttatttttactttattgcaaagtttctactaaaataaaattcagggcagaaattaaccaaaattccatcccgaagtcaaagttagtgtttttatttttctaatacaacttccagtccttgctcatattcaaaaggctaccttttcaatttttgcagtctacatttttacttaattttatactgtggcttctccctcccactttcctacaactgttttgtggttttttgtttgtttgtttgtttgtttgtttttagcctttctttcccaattctatctattccatccacaccatcacattcctaatgtaacaaatgttaccatcttggggtatatttttccagatcttttttctggtcttacaatctgtattaggcaaaattctaagatttcccccaatgaaaaatacccttgtataatcccagcccttgagtatgggtaacgcctgtgcgcataatatgattatcactcctgtgattatattatgttatattatattatattatattatattatattatattatatggaagttattttgctaatgtaattgaggtctgtaactagttgactttgagttaatcaaaggaaagattatcctgggtgagcctgacctaatcacataagcccttaaattaaagagtactgagctctttctgaaaggaaggtgattcttctctatgttttgaagaagtgaattgtcatattataagaggactatgtggctaaacctgagggtggcctctgacaggtcagagcaacccttagccaacagccaggtgaaaaataggaacctcagtcttagagttacaattttgattttgctaacaacctgaataaacctggaagaggacttcaagttccaggtgagaaagcatcccaacagacacattgattttcgcctcgtaagatgctgagcagaaaacccagtaattttgtggccagatttatggcccagagaaactgtgaaataataaaagggtgttgttttaactgccaaatttgtaattgcaatagaaaactaattcataatcatttacacacatatagagataacgtcactattgtttgtaataggatgttaaaatggaaatttgtagcagacaaattcacagttatagtcagaggttttattgccctacatcaataatgttagaataagttgatataaaattattaagaatgtagactatttgaacaacatgaacaaaaaccttaggctaattaaatactcaacccaacaatagcaaaacatataccctttccatgggcacaggaaacacattaaaatagatcatattctgggtcctaaaacaaatctaaaagaaagcaaatttaaaagagagtactttatctgagcaaaatgaaatcaaatgagaaattaataacagaacaactctagaaaatccttagatattaaaaaattgcatatcgcactgctaataaccccatgagttagagaagaatttcaaaagaaaattataaagtattctgaactaaataaaaatttcaagaccaaaatatcaaaatttgtatagtgctactgaattaataattaggagtaaatttataaaaataaaattttatattgaaaaaagaaagaactcatattaattaccacagcatttatataaagagattagaaaaaaaagaagagcaaaaaggagccaaattaagcagaagaaagaataataaatataaaagcatttctcagttaaataaaagtagaaaaacaatacagaaaatttaatgaaactaaaaggtggttctttgagaagaccaaaacaactgataaacctttagctacactgacgagaaaaagaaagaataaaggcacaatttaccaagtcaaaaataaaagaagtgtcatcacacaggctatatagataatacaaagataaaaggagaatattgtaaaaaatttaatgttaaagaaacttagaataaaaattttataaaatacacaaactattaagattcactacagaagaaatagatgaccaacatagccttatatctattaattaaacacaatttaaagttaaaagccttactgactaaaaaattccagcctcagatagctggctctacattggaaaattcttaaacatcaaggaaggaattatactaatactactgaaacttctaaaaagctgaagaggagaaataattgaaaagtaaatctatgaaaaaacaaattattttataaagtcaccattatcctcacaccaaaaccagaacaataaagaaaaactatagatcagtatctcttatgaagatagatgcaaaaaatataaataaaattataataaattgaatccaacaatgtacgaaaaggctaatatatcaatcatgactaaacagcatttatactaggaatgcaaggttggtttaatattcaaaaattaagaaatgtaacttattataaaactcaaaaagaaaaaagtaaggtcatctaagtagacatgtaaaagtaaatttgacaaaatctaatatactttcctaataaaaactctcagaaaatagaaatacaaggagattcctcaatctcttaaagggcatctgccaaaaactcatacttaatgatgacatcatacttaatgatgaaagaaagtgttcctcctgagattaaaaaaaaaaaaaaattttcatgacctgcctgcaacattgtcatggaggttctagccagtgtaataaagcaagtaaaagacattaaaagaaatgaagattaagaaggaagaagaaaactgtctttattcacagaggacaccattgtctatgtaaaaaatataatggaatctacaacatatcaattagaaataataagggagtttagccacattgcaggatgcaagatcaatataaaaaattaattatagagcacaacatcaggaacagtagcatcaagagctccatggaatctccctccagcaaaacaatcataataggtaaaaactgaaaaaacaacaaaaaccagattactttaatctcttgaaattgttataagagcatacagaaaattttttaaagataatttattataataaatctagtaaatattggtaagaacagtgctactctgtggcatttgagccactacctgttccctccctcctttcttcctgctcagcatgacagaaacattatgtcagggcagtgcagtgaaatacacaggactccctctcaccctacttcccacttaaggactatgacaccttttggggagaatcaggccaccagaatttctccttctctccgttttttggtatagaaattcagtcaagaagacccctaaacgaagtcaagaaagaatgaaagatatgggactttctttccccacacagttctaattaaagggtaaaacttttatctcaggcatgacagcctgagactattggagcccaatttactcttgtcccagatcacttgtgaggcttcacactagaagattccataccagatgaggcaaactaaaaaagacagaagccactggctctgtccactgtcctgctagtaaagcagatgtgttactccaagacaagtgggtcattgcccccctccaccccaccccactcaagagcagtcacaaagcccatttgcctagaaagagagtgatcagatctctatgaagaaacggattttatttggaatagcctgtgggaaagttcaagccttagggcaatttcaaaaacaatgaaggttttggtggtaggtaattaagaagatgcaggtaattccatgtaagcatctacctaaaccttagaccagctgaagtttaccagagataatacaggaaaagatacagaagagcactcctagggttgaagattcatcttaaagcctacctctgcaaagagacctgactttcttgaaaacaggctgcaaagcaatttaggtgcccagggcattgttgaaaacaatagagcaattatccatcagttcatgtaacctaacagctagatgtgaccaacaaagtcaaataacctaatagacgaatcaaggaaaaagtcaaagacagcccttctaaaaacattgtcatcccatagtgacagtgcacatctcataccacctttttgttctaattgggccattaatgtatttgatgatgcccaaccatgttgctgaagccaactttctttactcagtctatgacttaaatgtttctcctggaaacacactcacagacacaccaagaaataacgctttaccagctatctggacattccttagtccaattaagctgacacataaaattaaccatcacaggcaaagaggagaagcagcaaacttgacagtccacttgatattgcatttaaggagcaaaatcaaaaggaatgaagaagcaaaaagagactcttgaaaacaaaaagtgaaaagtgactcatcacataaaatatatctccaataagattagcagcaaatttcacaaaataaaccttgcaggaaagaaagcagtaggatgatatatttaaagtcctggaaaaaaaatgcaagctgagaattctatatctggcaaaactatctttcaaaactatgggagaaattaagacatcccaagacaacagctaagggagtttattatcactaaaactttcctacaagatatgctagagagagagtccttcaagttgaaaggaaaggacatcagacagtaattcaaagtcatgtaaaaatatacagttcttaagcaaaggtaaacatgtggacaaatgtaaataaacaatattattgtaattttggtttgtaacttaagtctttcattttctacaaaatttaaaaaacaaatgaataacaaattgtaaacctatgttaaagactatgtgatataaagatgtactgtgtgacattgataacataaaggggttgaaactgtatagtagtagagtttttgtatgtgatgaagttaaattggtatgaacttaagatagagtaacataactttaggacattatatgcaatccccatgataatcttaaataatctacctatagaatataaacaaaaggaaataaaaagggaatcaaaatgtatcaccacaaaaaatcaactaaaaataaagaaaatcagaaaaggaagaaataagggacaaaatagcgataagaaaacaaaatttacaatgtcaattgtaagttcttccctatcagtatttattctcaacataaatgaaaatatttatattttcattcaagagacagattggctgaatggatttttaaaaattaacaggatccagctatatactgtctgcaagagactcactttagacctaaagacacacataggttgaaagtgagaggatagaaaaatgatattaaattcaaaaatttaccaaaagagatcagtggcaattatattaatatcagacaaaatgcactttcagtgaagaatggttacaaaaaatgaagtaggacattatataataattaaaggatgaattcaccaagaagacataacaattataaacgcatatgaaacaaacattgagagaattgaaaggggaaatagacagctctacaataataggagactttaataacccactttcaataatggatagaaaaacttgaaagaccaataagaagatagagaacttaagaactattttagagcaattgtatctaataaatatacacagaatactccatttaacaatgcagaatatgcatttttctgaagtgcacatggaacattctccaggatagaccatgttaggctacaaaacaagtcttaataaatgttaatgtatggaaatcatatgaagttttttctcatcacaatggaataaaactacaaattaataccagaaggaaaactttaaaaatcagaaatgagtgaaaattaagcaacacactcttaaacaggccatgggtcaaagaagaaatcacaaggtgtattagtttgtttacatgatgctgatgaagacatacccgagactggaaagaaaaagaggtttaattggacttacagttccacatggctggggaggcctcagaatcatggcgggagtcaaaaagcacttcttacatggaggcgtcaagagaaaatgaggaagaagcaaacccagtaatccctgataaaccaatcagacctcatgagactattcactatcataagaatagcacaggaaagactggccccccatgattcaattacctcccactgagtcccatttgaattctgggagataaaattcaagttgaggtttgggtggggataaacccacccaaccatatcattctgcccatggcccctccaaatatcatgtcctcacatttcaaaaccaatcatgccttcccaacagtcccccaaagtcttaactcatttcagtattaacccaaaagtccacagtccaaaatctcatctgagacaaggcaagtcccttctacgtatgagcctgtaaaatcaaaagcaagctagttacttcctagatacaatgagggtacaggtattgggtaaatacaaccattccaaatggaagaaattggccaaaacaaaggggttacagggcccatgcaaatttgaaatccagcagggcagtcaaattttaaagctccaaaatgatctcctttgactccaggtctcacatccaggtcacacttatgcaaggggtgggttccaatggtcttgtgcagttccacccctgtgactttgcaggatacagccccactcccagatgctttcacgtgctggttttgagtggctgcggcttttccagccacacagtgcaagctgtcggtggatctaccattctggggtctggggatggtggtccttttttcacaggtccactaggcagtgccccagtagggattctgtgtgggggctccgaccccacatttcccttccacactgccttagcagaggttctccatgagagccctgcccctgcagcaaacttttgcctgggcatccaggcatttccaaacatctgaaatctaggcggaggtttccaaacctcagttcttgacttctgtgcacccacaggctcagcaccatgtggaagctgccaagccttggcagcttccaccctctgaagccacagcccaagctgcaagttggcccctttcagccacggctggagtggctgggacacagggcaccaagtccctagtctgcacatagcacggggaccctgggcccggcccatgaaaccactttttcctcttgggctttcgggcctgtgatgggaatggctgctgtgaaggtctctgatgtggtggcctgcaggcattttccccaaagtcttggggattaaccttaggctccttgctacttatgcaaatttctgcagctagcttgaatttcttcccagaaaatgggtttttcttttctatcacataatcaggctacaaattttctgaacatttatgctctgcttcctttacaaaactgaatgcctttaacagtatccaagtcaccccttgaatgatttgctgcttagaaatttcttccgccagataccctaaatcatctctctgaagttcaaagttccacaaatctctagggcaggggcaaaatgctgccagctactttgctaaaacataacaagagtcaccttcgccccagttcccaacaagttcctcaactccatcggagaccacctcagcctggatttttttgtccatattgctgttagcttttcgggtaaagccattcaacaagtctctagtaagttccaaactttcccacattttcctgtcttctttgcagcccttcaaactgttccaatctctgcctgttacccagttccaaagttgcttccacattttcgggtatcttttcagcaacctactctactggtaccaatttactgttttagtctgttttcatgctgttgataaagacatacctgagactgggaagaaaaagaggtttaattggacttacagttccacatagctggggaggcctcagaatcgtggccggaggcaaaagtcaggggggcaacaagagaaaatgaggaagaagcaaaagcagaaatccctgataaacccatcagatctcatgagacttattcactatcatgagaatagcatgggaaagagtggccccatgattcaattacctcccctgggttcctcccacaatatgtgggaattctgggagataaagttcaagttgatatttgggtggggacacagccaaaccatatcagaagggaaattagaaaatatcttgagacaaatgaaatgaaaacactacatgccaaattatgggattcagtaaaagcagtgctaagagagataattgttaatgttaaacacttgtattaaaaaagaagaacaagctcaaataaaaaatccagtgaggagagtaaaaatcacctggtgaccatcaagcaagccccaaagacaaaaatttcttatctgaggaatttagaagtaattagactttcctattgtctaaaggcacctggttccaggcctcttttcaacttaaaatttataaatataactagaatttctatacatctctggaatgcacgcatatcaaaactcattgtgcaacctttgccaacattaaggaaccataatatctacaaatgtaatcatttattgtgcaaactacctttcacttcctgctttaaggtccataaatactcctaaggaaaaatccactgtgggcactcagtcctctcttgctgtggtgcctggctgcactcttctgcagtgttctttgtatctaataaaactttccttttcaaatctatactgttgttggtaaattcttcttaccaacccatgagtcaaccacttccctatgcaggaactctgacacctcgcctgatacctaggtttacacctgaaggacctaagaaatatataaaaacaaactaaacccaaagtttgcagaagaaaataaattgtaacataaataaataaaatagagactagaaaaacaacagagagcatcaacaataccaataattggttcttcaaaaagatcaacaaaattaacaccttgtagctaagttgacaaaaaaagagagaagtttcaaagaactaaaatccaaaatgaaaaagaagacattattaattactactaatttttttttttttgagatgaagtctcactcttgtcccccaggctggagtgcatggcacaatctcggctcactgcaacctccgcctttcggtttcaagcgattctcctgccttagcctcccaagtagctgggattacaggcacctgcaccacgcccggctaatttttgtatttttagtagagacgaggtttcaccatgttggccaggctggtctcgaactcctgaactcacgtgatccacccacctcggcctcccgacattactactaattttacagaaataaaaagaattataagaaagtcctgtgaacaactgtacctcaacaaaataggtaacctagatgaaaatggacagatttctagaaatgtacaatcgactaagactggatcatgaagaaataaggaattccaacagatggataatgagtaaggaaattgagtcaatcatcaaaaaccttacatgaaagaaaagttcagaatcagatggcttcatcagtgaattctaacaaatgtttaaagaagaattaacatcaatcttcaaattgttaaaaacattaaagaggaaagaatacttctatagtcattcaatgaggcccgtattatgctgatgccaaagccagaaaaagatatgacaagaaaactacacaccaatattacttatgaatatcgatgccaaaaattgtttggtttactaggaaaccaaattcaattgcatattggaagtattatatgccaagatgaagtaggatttattcctgggatgtaaaggtagttttaaatacaaaaattaatttgccataccacattaacagaatgaagttggggagcgtgattatctaaattgatgcagaaaaaaaatgccaaaatacacattttctcgtgataaaaacactcaacacactaggaatagaagaaaaccatctcagcacaataaagatatatgtagaaaacccatagctaacatcatactcaatggtggaaaactgaaagctttttctataagatcagcaacaaggcaagtacgttcaattttaccacttttatttaacatagtgctaaaagttgtagccagagcaatcaggaaagaaaaataaataaaaggcatctaaattggaaagacagaagtaaaattatctctgttctcagatgacatcatcttatatgtataaaatcccaagaatacacacaaacatcccccccagcacacacacaggaacaaacaaaacctgttagaactaataaacatatttagcaacgtttctgtaaacaaaatcagcacataaaaattggctatatttgtgtcctaacaatgtgtaagctgaaaagaaatttaagaaaacaattacatttacaatagcatcaaaagaataaaaaactaagtctaaccaaagagatgaaagatttatacactgaaaatgacaatccactgctgaaattcaagaagacacaaataaatggaaagaaatcccatgtacatgaactaggtgatttactactattgttatgatattcatactatccaaactaatctacagattcaatgcaatcccttttaaaatttcaatgatgtcttttgcaaaaattaaaaaaaaaatcactcctaacattcataataaatctcaaggaattcccaactgccaaaacaatcctgtaaaggaaaaacaaagttagaggtcttatattttctgcttttgaaacttactacaaagctatggcaatcaaaacagtgtagtagtaacataaagacagacatatagaccaatggaatagaatagagagcacagaaataaatctttacatttatgatcaaataaacaatggtgccaagatggcttaatgggggaaaagacagtcttttcaacaagtggtacatagaaaaatacatattcacatgcaaaagagcaaagttgaacattttattgtctaatattattgaaaaaacttaactgaaaatgtatcaaatatctaaacctaagagctagagctataaaacttttgggagaaaacataggggaaaagcttcatgacattggatttggtagtaatttgttggctatgacaccaaaagcacagacaacaaaagaaaaaaaatacacaaattggactccatcaaaatttaaaagatttgttcatcaaaggatgttatcaacaaagtaaaacaagtaacacaaaaaatgagagaaaaaatgcaaatcacctatctgataaaggaataatatatagaatataaaaagagcccctacaactcaacaccataaaacaaacagttcaattcaaaaatgagccaaggatttatagacattggtccaaaaatatatacaaatggtcaataaacatataacaaatactcaacatcaccaggaatcaataggaaaatgcaaatcaaaacacaatgagacaccacttctcttcaaaaatgcatgggggatttgtggtaattgggtatgtcaagattattatagacacagaaatgatgattgtgaagaactttatactcacagattccccagaaacaggaggcatagcagcccacacagggccacatgagagaagcaacaaggtcagttaggaggcacaaggggaacatgggaaaacatggcctggagcctttattcggggtttcctgggaagaaatgggcaaggcaggataggtacacccagtatatttgggatatgttttaacaattttggtgagctgtagactataggagtcatctctagttgtctggtatctggctccagggtgatttaggacaggaaaaatattggctcggtgtgtgaaagtttgataaaggagatggttggggatgtggactgaattgttttgtttgtatatcaaagacaggctgaaaggggagttgtttgctgtctgaaattagttagttacccttgggaaaggaagtttatctggtatcaatgaggccccaatttccagagcatcaagagtgtggaaaacttagtcaatacaactttaggatggctatttttcaaaacaaaacaaaacagaaaacaagtgttacaagggtctgaagaaatttgaaccatcagtatttctagtagaaataacaaatgcagcagcaactgtggaaaacagtatggcagttcttgaaaaattaaacagaattaaaccataggattcaacaattctacttctgggaatattttttttaattttaaaaaataagtttatgaatatttgtacactagtgttcatatcagcattattcacaatagccaaaagttgaaaacaatacaaatgtccatcaatagataaatggataaattaagtgtggtctataaatacaagtggaatattattcagcctttaaaaagaatgaaattctgatacatgctacatgggtgaaacttgagtgcattatgctaagtgaagtaagccagacacacacacacacacacacacacaaatgcatgattccactgatatgagatacctacagcattcaaattcatacagacagaaagtagaatggagttttacagtagctaggggaggagaaaatggaaagttattatttaatgtgtatagagtttcaccatggtatgatgaaaaagttatggaaatgaatggtggtgattgttacacaacaatgtgaaacttaatgacacagacatgtacacttaagaatggttaaaatggtaaattttatgtcttgtacattttaacacaattttaaaaattaaatctaacaataactaaacaaaactaggcagtttttctccataagctgtgcttttaatcattttgttgtaagtaatgatacagaaatgttttcaccaacaaataagtttatgaatatatgcagacatatagatatataaagcaccattaacttaaggttagggtaaaagcatttgagtatgatcgtagtacaacagctcataaagcaatatttaataataacctagacaagacaatacatggtacaaatatattacgagagaaaaaaggttgtaatccattgttcagtctttcctcaattaaaatagagctttattccttagtttaccttcatcttttctattcacttacatctttcttcttcttcttcctcttccattttccatgccattcatggtaacagtctctgctgtaagcatgcaaaaggaagaaggtattggcatttccatacaacaaagttcttgaaaattttcaatgaattcactaaatgtttctgttacaaagatattcaagagaaaactgaagaagcagcgtagggaagtgtctttccatagagagggcatgacttctagaatttactaatctaagaacaaaagaatacggcctatagaaaaagtttgcttcataaacaggaagtagaagtctgtgtaatgtcattttgaccaaagtcctttatcttaatagaaaaaggtgatttttctctctaagaaggctaagtttagtagggtcaggttctcgagttaaaataaataaaatctactctgtctaggttaaccagtaagggatttatttataaaaagatcttaatagctaccagaatagcagttatctgggggaacagataaggttgagattccagaaataaaacaacacaaaccattcagtagaacaggctgcatttaacaaacaaacaaataaaattaatagcactgccatatcaattactggaagaaaggaagtcagcttttctgaaaccactgttgataaatgctttgtaattttctaaaatgtgttaacgtaattaggtgatagtccccagttatttaattaaatgctaatctagtgtttttgtgaagtgactttggagatgtcattaaagtccctaatcagttaactttaaataagggagataagcctggataatctaggtaggcatgacaatcacttagaagacctaaaaagcaaggcagagtgtttcctgaaaaagcgcaaagaaattctttctgttgacaactttggcccatgcccgtgaagttcctcctactcataatcttccctttctgactgcccaccctacagatatcaaacttgtttcaactgtatcagttcacaccactgtataattcaattccttggcacacctctctagagagctagaaagcgaattaaatatgtatagttagagagacaggaaattctgtctgctgtaacaccctatggcaaaaacctgactttgcaaccacttccattccccaaatccacaggcttcccataaccaaaggacaattctactcaaaacaatgtcctctatttcctgccttcagatcagtgaaactagtgggtatatgtaagtcaaatgcctacagcctagctctaagtgagactaggaactcaattttgatttctactttgaaaagacagacttctcacaggtgaattttcccagatactggaagcctatccaaaaggttgaaaacagccataaatataattcctggccgggcgcggtggctcacacctgtaatcccagcactttgggaggctgaggtgggtggatcacaaggtcaggaatttgagaccagtctgaccaacatggtgaaaccccgtctctactaaaaatacaaaaattagccaggcgtggtggcacgcacctgaaatcccagctactcaggaggctgaagcaggagaatcgcttgaacccaggaggcagaggttgcagtgagccaagatcatgccactgcactccagcctgggcaacagagcgagactctatctcagaaatatatataataattcctgctcctcaaatttctggcttctcaaaaggtcttaaaggaagaatttactctttaacctattaatcccaattaataattgagtaacatattcaggattaatagctgaaagagcaaattgtgttttatcagctttgagtatgttactcaactgacttgagatctcaacataatggtgatcatgctagctttgattaaacaatcacgtgatgactattttcctatgttaatgcatattagtctgtgcatcagtctggatgctctagattatagggctgtaacaagtaacctccagagctctgtggcttaatacaacaaatgtttatttgttgcacatggtacaagccctatgtgttgggcagggggctttttttaccatagtcacttaggaatgcaagttgagggacacttcttcttgaagtgcacttccataattatcaaggcagaaaaaagggacatggtatattgtgcattttatgttaaaacttctataagagaggtcacaggttccttctgctcacattttgccaaccaaatataggtcattcttagattctggagaatatggcaagtgtaatctaaccataatttttgaagaaacacaatgtttgttaacaaccttctttttttttttcattcccagtaagtctttatttattcactgtattttcccagggaaaggagaagggaagggaagagtcagcatgtgttacaaaatgattagaaaatgggaaaggaagtacccagtacagcaaattcaaccacaaataaatacaccccagtgatggggtcaccaaagcccaaaggggctcagtctcctgcagttcaggaatgaggggaagggatcaggaaaagaacagacaacctcaggctttcctaccctccctcccaataaacgcaaaatttcacacaaagctttggtttctagcagcaaacatggagttacattcatttgtctcctattaaacaatcttgcggccactttgacaaaagtttcttgcacttgcataacaattcctgagtgccttggatatacattcgtattccctttcttggcctcctgaccccactttccacatggaaggcccccagttgcttctctctactttaggattaaagattaactaggtttgatccatccaaagtacagcagtgtcttaagagtttggcatggatacatcaggaaatggtcttgactcaggaagttgggaacaagcgatggagggttcctagcttcttcaggatgtttgcataaatcatttaagagttgtggagacactccgagcattaaatgtgtatgtgtctgggtgtgtaggttttcttttggggatgaacagaaaacagggcagggtaggagacaagtttttaggacagaagatgtggtctaataggtaatggggaagaggaacacaaaataaaggatggttcaagatctccactttaataagagggcaccccaaactaatgtttgagatctttttgcctggcgcagaaccttctgtcaaagatggtctcaatacaaaaagaagttataagtaaacaagtaaacaagaagtaaacaaaaccccaaaagaacatggaaaaagaccaatgcattgtatttacataaagtaggccctctagcaatcaccaactgggtgaagtcctacaaagcccagacaaatacaataactgggggagtggggagggcagcattacataaagtaggccccctagcgatcaccaactcggtgaagtcctacaaagcccagacaaatacaataactgggggagtggggagggcagcatttagggaagataagaacccatgatcagacacacaccacccagtgcggtccatttcatttgtcccgtttcaacacagtgaggtgggtttgtggtgatctcagagcatgtaaacgaaacccttttctcctttagctaccgatactattaatcactactgtagcaagcagggcatgggctccaggcaccacaaagaagccctcgcatcaggagatcgagaccttcttagctaacatggtgaaacctcgtttctattaaaaagaatacaaaaaattagccgggcgtggtggcaggcgcctgtagtcccagctacccggaaggcagagcttgcagtgagccgagattgcgccactgcactccagcctgggcgacagagcaagactctgtctcaaaaaaaaaaaaaaaaaaaagaagcactcgcttatgggtttccctggaacccccaaattttgaaaggttaaggattttagaccttgcttcatatacccagccctcgacagcacaggataagtacagaggtattggtctttaaacttatccctaccaactcacatttttttccaaacacacataccctctggaacatggtagacctaatctagtgaagaatggatctgggatgtaaagcatgtcctgtgccctaggattagacaagcctcacctaatcttggcttcctctctgggcctttcacctggcccaacctctcctaatctctctgcaccaccatttcctgtttagactaatttccaatcttccagtagttggctatcgagtcatgaggcaacccagttaaaacctagtctcccataaaacattttcaaggcagagggggtttcaagaggatattatggcagaaaagccagctctcattagcaaaaatgaggtagttcaataggccaggcactccaaatagttgctctccctggttccaaaaatgacaaaaagtatttctgctgtgcaaacctggagttgctgccggcttgttcctgagaccgctcatgtacctgagaacacagtgcaggaaatgagggccttaggttaaaatatacaaaaatacaaaagcagaatatttacattaaggaaaaaaacattaaaatgcacaagatgacgtcagtcgcacacagctaatgcagttggcatcctgcagaaagtgagacctgaggtgctgtatccaagggcgcaaataaataaaatcacattggcccagaatggggtgggggtgagcataggagcagcaggtttgcagctgttctcccaaacacccttcttgccatcatctgtagccattgcttgggagagttcccaggaccctaacccaaaagtgggtataaggatacaagatgtgaaaacaaaacaaaaacactgccttattcctgagagattccctcccacagaatgtagtggcttggctccatggatctggtcttgtacttaatcacttcactctggcgtgggaattattactatatattcttctttaaaagtgtcggaggtgtttgaaccagagtaactccatcttgaataggggctggctaaaataaggctgggacctgttgcgctgcattcccaagaggttaaggcattcttagccacaggatgagatacaacatacaattcataaagaccttgctgataaaacaggttgcagtaaagaagccggccatgtaccagcaaaaccaagatggcgatgagagtgacctctggttgtcctcacagctacactcccaccagcaccatgacagtttacaaatgccacgccaacgtcaggaagttaccctgtatggtctaaaaaggggaggcaggaataatccacccctcgtttagcatataatcaagaaacgaccataaaaacgggcaaccagtagccctcaggggctgctctgcctatggagcagccattcgttattcctttcctttcttaataaacgtgctttcacggactcaccctgaattctttcttgcgccatgtccaagaaccttctcttagggtctggatcgggacctctttccggtaacaaaggaaaacaacttccctatctaggccattttcaaaagctggaaattcccgctgccatcccccaccgcccccagaagccctcacttgcatatggacagagcatggttggagttcctttgcctcaccttttccccccacctagagggaagaaggggcgatggtgtgaaccccagcctgagatacatggcagtgccaactggcccaaatgcaccctattcccactttctccactttgcctgttccatgaaacttcctgctcttgggaaacaggaagcttcaccctttgtggctcaattcttggaaccccagaatcagggcagggctgtggatttcttcttcttcccttggagagtaggttggcttgccctgtgcgctaggggcctgctgggccttcagcagacacgaggctaccacatggctgatgctctggcagaagtggcacttcttgggctggggtggcagcttgcattccttagcatgatggtctagacctccacagttgtagtacccgtctccttttgatgtgcgtttctgcatgttcttctcctttggccgcctctcactcccaatgcagaacaccccaccaggtccggtgacacaggtagtttccacacccttgggtgactcctccactgtttcgtcctccttcaggctccaggaagccctccgtgtgcagcttactctggtacacaaagacgtccactgggggatcgagcgcgaccctggctagggcggtcatggacaggaagacaaaccccaagcccacgttgaaccgcttacagatgcccgcatcgtgcagcagctgaggcttgtccgccggcggggccgtgtcctccggcacctctttaggcgcctcctctgccaccttagcgcagccacctgctaactgctggttggacacggagcccagggtcgtcagctgagcccgcagccctgggtccctggttgggcggctgctggccccagagaagtccgaaggcttcaaccttcttcactacctatgttttcaacggctgtgtaaaagaatgcatatacttcacctttaaagggtttacttggtggaaataaaaaaggaattcataaattttaaagtttccgcttacataacagcagctagatctggtagggagtcggagcatgacaattccatggtatgcctgctgcagagagggcccagggtaaggtaccgcttccccacctgggaacacacagaaagatttctagggcagtataattatttctagaatgagaaatcattccaagaaaataaagaggttgaaaacacctgtctggcttcccttaggggagatcacagatggttaaaacgggaagtagagaaaggaaattatctatatatatgtgtatataatcattggagaacctgaaaatatcaggagatagatgagtagattcatttcatagatgcagcctttagcgggagggcacttcactaaaagaagccccagccccatgttctccaaacatgcattgggaaaatagcatttgcacagggtacttctgaagaagatctgttttctcacactcttcaaggaggcatttcgagatttcagaaatccttctgtgcctcagaagggaggggtggactcacagatgtgtggcaatggcctgagtatgtaatgaagaagccacagtgtgcagacttagagcagaggcagaatggtggaccctgagatattatctgtggatacctggaaagcaagtcagaaggaaaggcaggaccagtcatgcgtcagcagtcaccagtccagggaacagaagagacacgtcaccagtggcaacagccattgatgatctgaggacagtgaacatctttattggttctgtggaacttcacaaacctcctgccctgatgcgccatctccagggagggtaaagagaggctggaaaaacaaaaaaggctgaattatccaaaatcaggaatttaagccagaagtaagtgaaagttggcaactggaagaatgagtccacaggaggaatattaggactgttatagaatataaagtttattttatgtgtagaactcattatcattttatataaatgtataatccaatgacaaataccttcaaatatttagcaaacttgggtctagttccatggaaaagttgagcatttatgaaagttaagaaatatttaagaaattaaaaatctttcaagtgtttcttcttttttttttttttttttttttttgagacggagtctcactctgtagcccaggctggagtgtagtggtgcgacctcggctcactgcaacctctgcctcctgggttcaagcaattctcctgcctcagcctcctgagtagctgggactacaggtgcacaccacggctaatttcttttgtattttagtagagacaggcttgcccaggccagtctcgaactcctgagctcaggcaatccacctgcctcagcctcccaaagtgctaggattacaggcatgcgccaccatgcccagccaagtgttctttaaaaattgtgctttgtgacaactctaaagataagcctattctagaaatctctccattgaatgcttattttaatttcaataaacttgggataatagtgtaataaagtgtcatatggttattcttcatctttaataattattaatactctactatttatgcttcatttttctttcttttcattttttctttttctttctccaccttcctttttaatttcctccttccttctttctttcctttcttccttcctttttttcctgaagtatcttaaaatacaaatacactcaatagatgttttctaagtaaataaatgacacacatgtgtggctttaaatgtcaattaagaagttattgtgggccagttaaaattacaagttgttaactctttcccctttagaagttttgagtcatgaagacaggaaacagataaacaattataatttagtgaactaaacacaataataagagtatgaactgggatagtatgtaaatgaaaggatataaattaataggaagagcataataggaagaaaaaagatgatagaatatgatggaagaaaggctactacgggtggaaggaagagcattgggcaccaggaacacttgtctgtccacggtatgtaggaggatagcgtgaacaagggcagtaattcatctgaaaaaaattcaggtttttacttccagattttcaggaaaggtaaaaatgagaatcaaacctattaaacacattgtgccagagaccaatagtcccctttttgatcctctcttcacctaccccttgagggaggcacttaaggtagtttgcatgcatgtggaaattacaaacatatgtacatgtgaacatatgcatacaatatatagaccaatatgtatatgctatgtatatttatatggtgtatccataatgtaagatatatgtgtgtatatatgtgtgtacaagtttcatttgtgtatggaaataaaacaaccttggatgggaaaaaaaaaaaaagacgaagaggcatgagaggagagcatgttaccttcagaaactgcaagtgatgaagcctcaatgggccacagatgagatttatggagaagtggtggaagacgagcctagggaaagcctataaaggaacaggcctttatatccttgtatatatgttttaaatccttagatttagggggagtttttcagttttaagctgaaaggaatggatcagatttagttttggaaaaatcaatgtgaaggataaacacaacctggtataaggtaaagactaatgagatagacaaaattggcaagagtgataaaaaatgaaacagaaaggttacaactaaaacatattaggggtaaaagaaatatataactgagctccaggtaggatttgaaaagaaaaataaattatagtgaacaactcgaagccagtgctatgaaaaatcaaatagtgaaacatttttaggcaaaagataacatcaaaactaacgagaaacatgacagttttataatatttcaataaagaaatttaatagttaggccaggcgcgttggctcgtgcctgtaatcccagcactttgggaggccgaggcgggcagatcatgaggtcaggagatcgagactatcctggctaacacggtgaaaccccgtctctactaaaaaatacaaaaaaattagccaggcatgatggcgggcgcctgtagccccacctacttgggaggctgaggcaggagaatggcgtgaacccgggagatggaggttgcagtgagccaagaccgcgccactgcactccagcctggccgacagagcgagactctgtctcaaaaaaaaaaaaaaaaaaaatgaaatttaatagttaaaaaattcagccccccccaaacaaaacaaaaacataaaaaacctagtttcatagttctagcagattgtttcataagcaaatactaacagatattcaaaaatcagtaatttttttactattcaagaaatcacatcctctccctttccctcccttcctccttccctctctccctcctttcttctttccctcctctcttctttccttccttcttttccctcttttattcttttcctctttatatattttatttttaagggtgacataatcttgatatccaaatttatagatgatagtacacgaaaaaaagcttccttagagcatcactgatggccataggtacaaaaaatccaaatagaatataagcaagaaaatccagcttcttaatacatggacacatatacacacatatataaacaccattaggaaaagttgggtctattctaggaaagcaaaaatattttcattagaaaaatctattaatgtaatttggtataaactgattaaaaggaaaaaattgtaattttcaacagaggcagaaaaatcatttaataaacccatatccattaaaaataaatagttccaaattaagaatagaaaaaacctgttaaaacctgattgagcaaattgcattcttaaaaataaatgataggaatattttctttgaaatctgcaacaaaattaagacactcactgtgagtgttacttttagtattgtataagagtttctaaaaggagttcattaagatgagaaaagggaattttaaaatataagtattgtaaataaataagatactcattattaaaaaatgttatgactattataattgtcaacataagaaacaaaaccaatagagttaataaagagtttaaggaatattgctaagtacaaaacctttatttaaaaatgtatctctagatatcaggaattaatacttagaaaacacttttttaaaggtatcatacaaaatgttcgtaaatatataaaagtataatacagtattcaaaatcataaaagagaacatcagtaattgagagataaaccaagttcatggatgggaacactcaaactcaatattataaaaatgtcagttctctcaaaattaatccataaattcaatgcaatccaatcaaaataccaacagagttattaagaaacttgaaaatttattttaaaattcataaggaagagtaaagggctcagactagtcaagataattgaagaagaacagtgtaggggttcttagtctacaaaataacaaacattattataaaagtgctacgattaagagactgtaatactggtttaagaatagacaaagagacaaagaattcaaacagagaacccagaaactgaatcacaaaaccaggtcaacttgatttatgacaaagacaaagattagtgaagaaaggatatgctggtcaataaaaggcactggggaaattatcatccactgaaaacaaatagtattcctaccacaaaccatatgaaaaaaattgcagttgaatgaaatgtttcaatgttgaaggcagaaaatctctttatgactttggtgtattgggaggattcattttataatacacaaatagggaaaaaagagaagataaatccaatctcacattgtattaaaaacttttgtgcattaaaagacacgatttaaaaagtgtaatgacaacctacagatgtagagaaaaggtttgcaaggtatacacacaacgaaggaggagtacaataccttctttatgcatgtagaaaagttttctatctctgtcataacaaattaccatgaatttgtccgcttaaagaacgcaaattaattatcttacagttctgtagtcagacacaggacacaggccttgctaggctaaaatcaaggtgttctattagaatggcttttatcaaaaaaagaaaaatattggcaaggatatggagaaaaggaaacctttgtacattgttggtgggaatgtaaattattacagcaattatggaaaataatacagatgtttctcaaaaaattaaaaatacacttaacatatgatcaagtaatcccgctcctaggtacatacccaaaggaaatgaattcagtatattgaagagatatctgcactgccatgtttattgcagtattagtcacagtagccaagatatggagtcaacctaagtgtcatcaagtaatgaatggataaagaaaatgtagtgtgtgcatattatacacatacacatatacatacacagtggaatactattcacccagcctttaaaaataagaaaatcctgtagtttgcaataacgtggatgtacctggaggacattatgctaagtgaaataagccaggcacaggaaggaaaatattgcatgatcccttatatatgaactctaaaaaagttgaactcataggagtagagagtaaaatggtggttaccagagactggaggttggggatttaggaaaaggtgagatgtaagtgagcgagtacaaagttttggtgagacaggtggaatttgttctggagatacattgtacagcacagtgactgcagtttataataatgtgctcaagatttgaaaattgctaagagaatacattttaaatggtctcaccacaaaaatgataagtatgtgaactggtggatattttaattagattgatttaatcattccacaatgtatgcatagatcaaaacttcatgtcataccccataaatatatataattaaataaaatgaaataaaattaaggtgctgtcagggctacatgcctttttagaaactctagcagagatctcttcctttgcttattaaggtcattgacagaattcagttccttgtattgtaggattgagatgaccatttccttgctggctattagctgacggctgtcttcagcttctgaaagtcatccacgttcctacctccagcttcagagccaacaacgatgggttaagttcctctcatgcttcgaatctcttcttcttccatctatctcatctctctgacatctttttttttttttttttttttttttgagccggaaggtctgggttccatttgttgacagcagtttatacacatggatttccttcccatagttatttccttcccagcacagacacagagcccttgagaagggcagtctctgaacaagggagccaggaacacaggtaagacacatccttggcaggcacgttcagtcccagcaggatgcaatccttcaagttggaattccagtgggtatttgagagggaccaaggttgggggtagagagggagtcttcaacaggactcacatctcagtccaggcctcctctctcactatctgagtccatccaagttttaggaccgtgggggacaacagtcaggccctcccacctcaacagggcagatccttcaatctgtgccaagttcacacacgcctgcttccactggtcgcacagttaaagagaatcagccttatggtctctgaccttaagaggtcttctgcttttaaggactcatgtaattactttgggcccacttggataattcaggataatatccttatctcaaagttctttaattaatcacagctgcaaattcactttttctatgtagggtaacatatgcaaaggctattattttgcctgtgggtatatccatctctacctatgcgtgtatcttaagatgaatataattaaaattacccagtttttaaacatgggctcaaagatatgagcaaggaatttaaagaagttcaaattgaaagacgtattaaaagattcttcatatcactagtaaacagtgtgaataaaaattaaaactgtgtatcattttaccagacaacagctgatgctggtaaagctgtgaatcagtggaaactctcacattattctgatagaacttaaatgtagaaaaccacttaggagagcaatttcataattctggttaagttaataattcttacccctcaatccagtgactgcagcttcatgtaagcatccctgagatagtctcatgcacagccagaaaggagacaggaacaaagattattactgcaacatgatttgtaatataaaactaagagaaataaatgtccatcaatgtaacattgtctaattattttgtttcatttcatttcattttaaagctgtgaaaatacgtgatctagaaatatactcacgtagataaaagaatctccgaagatattaagtgaaaaaaatcaaactacagaatatactcagagcaacataaattctataagacttgcaagcacacaaaacaaaaacatatactgttttgtgatacaatcatatgtagtaaaaattatgaagatatgtgtggaagttcttacacgcacacgggagtcaagaatttaaaattcaggaaaacagtttcaagtgggggatcaaggatagattaggagaatgcagctccattagtacacattttaaagtaaaagatgaatagataagtacttgttatttttaaatacttcatcaacataaagaattttatagctttataagaaaaacatcactaggattgagatgaaggaaaatttggaatgggcaggtagagatgccataaagctagaatggctattgcaacaattacatgaaagatgctaagatgccaaagcaacatggtggtgaaaaaatacaaatgaaaagatagatcccaaatatattttgagatttaatatgcaaaaccaatttaacagaaaggctttaatagtagattctaggatgcattcaactttttgattctggtgactttgtgaatattggcaccattgaccaagatgtatggggaggaacaggttgctagggaagataataatttgagtctacactttgttggcaatacttgagatgaaattaaggtgacattgggttagctactcagtaatacccaaatacagtcttcatgtaatcatccctccctaagagggcctcaagaaaaatacatgtacaaatggcatagtagtaaataatactctctggtccatatttgaagcaaaactctaaaagactggacatgactcgaactcctgtgatccagacttgaagtcatggccaaacttcaagttgtaacagtggactttattacttcaaatgagaggaaaaattaattcagagtctcccagcataggaatcggaacacaggtttcaatgcagggctacaggtttatagagtaaatacagtggaaacaacaacaaaatgtcggcaatgtctaggcaaaaaggtgcatcgggcagaagcttcatcgtttgggagaaaaagaaagtccccgggactagcaattttctagtctagggaaaaaacagtgtggtccatagtgtagcccttgccatttagttgcatccatacccgtcagcccccacctctgcattttcaaggctccttactgaaaacaaggcttctctgcctgaggatattttgtgtttttgtttgtttgtttgtttgtttttctctgaccagcgagcctgctccactggcataaaagggaagatacaacaggtcccagaagcagccattactgttgagtacaggaagttgatgtatatgtaccgcttactcaatccttggtcaggagcactctaaggcttgtacgtcactgtctcctagagtttccaatgcagctccagttgcctgcagtgctgactttcttgataacacatccactttcctgtattgactttcttctctgtcctatctcctgttcttactctcctggtgcatgtcccaactaaacaacgtgcactcaagcttcatggtttgctcctagggaaactcaaatgaagagagcaagacattcaaaatggcagtgggtaatggaatagagagggtgaatcccggcagccgtctccctcagattttgtctagttagctggcgaaagatggctgaagactcccagcatagctggtactccagtgcacaagctcctggcatgtcatcggtattgcaccccaacaccaacactgacagagaccttcccaagggtgttccatctgtgttgttctgtgacaacaccataggtggctggtaaagtttgcttagtaaaacagaataacacattaaatttttattgccattactctggctaaaagaattactaccgtgtaggaagaatttctgcttgcggaaatactgttaattgacagctgggaaaaattgtggtgataaaagttaattaactttaccaggtttctctggattttacaatacctgccgtttttaaaggccactgccagcaatcttggcaaaacaaatggaagaactctgcaatagtaactcaaacttcctatttcctttttttttttttttttttttttgagacggagtctcgctctgttgcccaggctggactgcgggctgcagtggcgcaatctcggctcacagcaagctccgcttcccgggttcacgccattctcctgcctcagcctcccgagtagctgggactacaggcgcccgccaccgcgcctggctaattttttgtatttttagtagagacggggtttcaccttgttagccaggatggtctcaatctcctgacctcatgatccacctgcctcggcctcccaaagtgctgggattacaggcgtgagccaccgcgcccggcccaaacttcctatttcacagcaaagtctgaagtgaaccagaggcactagcaggaaaaacattcaaacagttcaaacagctcttgggagaaattgaccatcaccagctttctttcagatagctggagcttccagttccgttttgcaaaatataatgcatgtatgacttgtatcagaacccctagtgatttaaaaatcacttctaaaaatatgcgaacttggggtcaacctcagatttactgactttgaatttactgacatagagctcaagactacatttttagccggctcataaggtaatccttctataatctcgaggtgagaatcatttatacttccttcagtgctaccaatttgagctgtatttaagttagcaagcattatttttaaaataagaaaattaatgtgttttcaaccattcacatatcaatattgaatttgaactaatgggagctgagttgctctaaagcaatggttatcaaactgcattcagaatatgcaaaagcaagcgtatgtttgattcaaattctgtttttaaaatattttaaagctgtattttaacaacccacatattcaaatgtgtcacagcccaaatttttaacacattagagacaaccaacttaagccatgttaccacttcaactaggctttgtgctgacttctaatagttttccactatacctctgcatctattgaacttggaagaaggtcatagacaagaaagatttaaattctgctccgatggctttttgcaggagtaagcatttctgcacacataaaattgtacacctgagttccaaacagaagctcatactcatcacgttcaattatgtgccaggaaagtccatgaatagcagtctctgcgcccagaacatgaaatgattcagtaagtgaacacagaatacatttaagcatgctgatgtcagagttttaatctttataaatgttaagtgtttggtctatgatttatactcatacatttttcgtagtatttcaggtaaaggtgataggattactcaaaacaagaaatggatcaagggttaaagaaagaaaaaagccgaaagaactgtgctgctagaatggagagattgagcaggcacaagaaaaattgacacactgtgctatgtaaatagcaactggtttttcagccaaagggggtcccactggggagagtatgaaacaaaagtcttgtgaaaattcttgggatgagtctctcagagacagtagagcacaagaataattattaggcatgtggcttcacctttataaggcaaaagtgcccaagtgctcctgtgttttatggagtgatatgtttccacattttctgtatccctttccaacttacaatgccatatttaaagcaaacatagtgagtagaaaaataaggatcttggtttctttcagcataaaaattacagggctttatataaaaactgtatgcaagcgaagtttagatccaaagattaaaatacatatatagatttgacatttttaagaataacgtacactatggcatcattcaaaggtgtcactaaatgtgaataaacagaagggcaggctactctggtgcagagtcatgcagaaacaaaatgccgtcagtacctttgcctgatgagaacagggagcatgcaacggcctttatccaacatttgatcaatgagtttgtaatcattttaaatttaatttgattgaacacaaaaaggactgacccatggccatcttgactttattttttaagcgatctgagtattttttgagggtgtgtttttgaagataaacatcaagaagacttacgttagaaacactggaaatttgggagggggatgtattgctaaatgtttatatccattttcaaagtgccatcgtataatttggtttctatatgtcagcgtacccagactgaaggggaagaagaaaaggcacaaaatatgacaggagtagagaatttcattaaaacattgctcccagccagcaccacgtccccagcttgcaaccatggctgcctacacactggtgcagatccagcatggccagagtgcctggaacctggggaaccgcttgggccataaggagtgaagtgcagcaggcaggcattgcaagatgctggctatgagtttgacatctgctgcaccttggtgcagaagagagtgatctgaaccatctgaacagtgctggatgcgattgactagacatggtggcttgtagcaaggacttggcgcctcagcactatgggggaactgactaacctcaataaagcagaagctgctgccaagcatggtgaggcccaggaaaaggtctcaagccctcctatgatgtcccaccccctctcatggagcctgaccatctcttccatagcaatgtcaatgaggactccaggtatgcagatttcaccgaagatcagctaccctcctgtgagaatctgcacccactcccttcatacgctgtagtcagaatagcacctctggggcataggttctcagtccaagccaaaagaaatctccccttacccaagagaattgaaaggttataactcaggtttctgccagtgctatgtttactaaagacctgcttgagtaggaaacaggaaggaatcatgttaaggcatgaccaatgaggagaatcaagagagcctatttgctctccagagccagtccggtactctttgtagtcaaatcaaagaaaagatctagtcattcccatggagatagatgtaacctacatgataatgtgaaaaccattttccccctgaccccagaggagctggctccagataaatgtaataaatgtaacctgcatgatgatgtgaaaaccattttctccctgaccccagagaagctggctctagaagtcttcagaaggttgggattaatcctgatttcagtttatacatagcatttatttttataaatatatatacctatataagtatattataaaagtatatatagtttatatacttataatatgtaataacatatatgcttatattattatataagtattatatatttatataggtatataagtatttttatattttatatatagatatacacacacacacacacacacacaaaatgacccctttttaagcttttagtgttggttgaaagagtcctacatgtggtcatgagaaaatgagccattcctcacactcatatgggataagcatcttgacctcctaggggttggagtacattctgctatgaaccttacattccctttccaaccttgtttcgtggcagtgaaatgcctcttgatcatgtccacgtgtgtctttcactatctgatttctgaatcatgttctaggggtttggccctgttacatgggcctagtactcattttgagaattactgtattaaaccttttttccagatcaatataataaaggagtaatatgcattttaaaaaatgctgaaatatgttcgagagaggttaacactaactttgatgccaatacttgtcaaaagtgttgaatgataacacaaatgtaattttataagagtgcctttccaattagatctttgtgaattctctgaaataacatgaatgatgatgtccaaatgttatcatacctgcaggtgttcataggcagccctaaggtgaggggttccaaagaatatttctgttgaaatacacatgctatatatctttatctataaattgtgaatagaaagtgaggaaccatggcctcatgcatgcacacaggtgctccttttcttgtaattttatctggattatacactgtgtacaataatagggtgaaattcattgaagtgaagccccatatgcccaagacttaatagacctgagtaagaagagtggaggtgccagagcagaggatgaaggtaacaaagttgtggagaggaggaagggactgaatcccagagtgcatataagctgggttctatccacctcattgacttttccctggcctggagcttatcactggtaagaggacacaacagtgagagcaaaatgacagtacttcctttgagactgacccccgtgcttggccccactttcatagttggagataatgttggatggggtcagtgaatcctgaagtataaagagattatccaactgcacctccaagtcaacatagctgcccaaccttcgatgccttgctgggctaaatgaacttgatctggacttcagaaaatataaaacattttgttgcatgccaggtaaaaaagatataatttgatttttctgaaatcttgagtaaatctctgaaaagatgagcaatgagaaaattttttaagtgaattgctgaatctcatgttactgaatgtatttaaaaagcatttttacccctccaaaagggatgtgtattaaaattcaataattaaaataattggatagttagatatttaaaataattcctattttgaaattaaatttttattccattttcaaaattatagacatatttgtttgaagtgtattttaatatttcaaagtgacttatgaacttgttaccatttgcagcaacttgtttgttggcatcaggattttttaactctatatgcaaaacatattttacaaaatgagaaaaaaatatatgacaaggttggcttaagactctgaatgccaacagtaagttttggtgttgtatctgtgtttaggcaacatcctcaataaactcttggttgaatttacagtaagtaaacctaacatatttgaaactgcaaataaatgtataataaaacaacactgtttttatctacccgtttattgaaggagagtgtaaaacttcataggatctcactataaagagcatttacaaaccacagctctaaggcaagaagaatggatttgaagatgacatgcgaaagcgtaggttaggggtgcacatgaggtctgggtagggcctctgtgggtgctatgagaagagggagaccctacagagggaggaggagggggcaagagaaggctggaaaggggcataaagaggaagatccgaaaacatattttcatccccaacttttgccagagaatacttctctctacccaggagagagagagagagtctgttcttacattgaagtttcaggacaggtaccaaattggagttgccattatgaggatgttttctattaagaggtcatagtgactggtgacttttttatgtctacaatcacacatgaaaattgcatcatagaccacatcattctaaaagttgagaaaatctgcctcctacgaagtaaactgatcacctttacaaacaggatagaaaatttaaaagggttaataatattcatgaattaaaaaatgctttaaagaaacttcaatttctttccctctcagtacagttgtttttaagggggagcaaagatgcaaaattaagtcaaagttccaattacagaaaaaggtcaaattaggataaaaaaatgtacagaacatgataaacagaaattagttgtaacctcttgggcaacctgacaaaagtgggaaatgaattgtgtgctcaataattagggtggaagcccaaacacactgggctttcagcacaccttgagggcttctgaggaaaacaaagcaatttattatctaggccaaatctgaagagacggccttgagggcagagggcttgctgcagtgttaccaactcatggggaattttagctgtgtgataagtgcctgttaggactccaatgctaggaagaacattttcagatgaaatcaatggtaaaataatatactatgattaaagaaaatcagttgcaagccaaaatcattaagcaaaattgcaacctctaacctggagtagcaagttggtacattattgtgttctgttaggtagtgaggcagtaacacatatctgaggatttacgtgttagtatgattttcttggctcttgagtcaaaaatgcttttagttatgcaagcaaaacaagtagaaatgatttgtactccagtgactgttgggatttactggttttaaatttagacgatttcaaattttgtttgatcgtgaactgctatcaaaggggataaacattacatgtgttagttgtcttttgctgcataacaaattaccccaagactcagtagcttaaacaaaatacgtatttattatctcacacagtatttttggatcaggaattcaagagcttcttaggaagctaggattgcagtctttggaaggcttgacaggggctggaggatccacttctgaggtgctggctgttggtgaggcctcagttcctgtcctgtgggcctctatatagaccagcttgagtgtcttcaagacatggtggctggcttccatcaggataaatgatcctaggaaccaaggcagtagccataatgtgttttatgacttcttagaagtcactcactgccatttctgcagcattccactggttacagtattttcatatgggagggaaccacacaggcataaataacaaaaaggagaccattagggagtcatcttacaggctggctaccaaattctcaaaagtaaatttatgtggaccctaatcctcttctatccctttcctattttaggaggataaaaacctccataatgccctcaaacttaaaatactaaccagatagagccattagccattcctaggaggaagatcaaatacaaggctgctgatcttgtatttgggaacacagagggatttagagctgtaccaattctggaaatgctaacaccaaacagatgcccaagagaatctgtttggaaaactgtgagtaccaaggttgaccacaagaacacaggaagtgacttgttcagaaagctgaacaagtggtcccgtctcagagggaactggtggacagcatagactgctagaaggtaacacagagatagacctcagagaccacgtatggccacaagagaaagatcatccactatcctcaggagctgatgtgatcgaagactatgcttcttgggagactttatcactactggtacactgcacatttaattgcatttcctgctaaaataagaaattaaaatcacagtctcaagaatgctttcatatacgtggagggatctcaatccaggaacaatgtgaattccactttatttttgcctttctctaaaggatcctgattctttgcaacatgcttaagtgtgtaagatatctggcttataaccagtggtatgctggtaaatgcttaacacctgactctccaggaaatatatatatatatacacacacacacatatatatatatttgtagcatttgacaatttccatttccatagtggaaatgtttccatcatggggtgatatcaagctaccaatgtgctgttacatagagagctggaaagagatgaagatgcgcacactcagttccagcacaacactgcttacaacacagacttaatacataccgtgttttggtccctcctagattttgtctctctgagcttgtctcatgtcttgggtagaaatcagcaaacttttccttcagtatttcaggctatgtgaactatacagtctctgtggcaactatttaactctgctgttataggtcaaaagctgccacaggcagtttgtaaatagtgggcgcaggtgttttccaggaaaacttcatttatgcaaacaggtggtggcctgttagcagtaatttttgtaattttctgaactgtgatgtgagtaagcagattccctggaatcagaggctgaggcaaggatttgggtatacgtcatatgttgaggaaggactctcaggtgaaaccttcaaggcagtgaggcagtaagacaaggaaagcaaagatctgagtaagaatatggcatgagttaaacaaagtgtaaccttggcctgactccatggaagagctctggagcataagtcacactgcagcgttgtcctaccttgaaaacaggtggctgggtttttcgtccccaggccagtcagttgttggccaggctccagagtggtgattatggaaaaacctccaaagggtctccatctctgggcaaggtggttcaaccaaggtgggcaaggtggttcaaccaaggtggtttggagaaggttacagctgtgaactgttagtggcaatgctcacagatgactgtaccagctggtaaagggaatctagcctggtccccccagtgtctactacagtacaggttctcaaacattaatgtgcatgagaatctcctggagggcttatcaagacatcgtttgctgggattcacctccagagtttctagttggtctgggatgagacccaagaattcatacttctaaattcccaggtgatgctaatggtgccgatcctgggatcacagataaacttcagagaccatgtatgtccacaagagaaagatcgtccactcttttcaggagctgacgtgattgaagactatgcttcttaagagactctaccactatacttgtacactgcacttttaattgtacttctggctaaaataaaaagaaattaaaatcgtagttttaagaatgctttcatatacatgaagggatctcaatccaaaaacaatgttaaagccattttcttttggcctttcactaaaggcatgttgcaaagaatcaaggcactttgggaaccactgtattatgataataattcctgagagcagaaagctaagggcttagatgacccatagtttttattatggcttattatctgaaggatgggaggggaggtgtaggggaagaaatgagtttctcaaatggttttcattctctttggctatggctttcccttattcagtaaatctagcttttacctgagatacatttatagtatactgcatggacttagtaaaaaaaaattcacaagattatctaaagaaaatttaataatcaaatccttttaaggttactatgcccctgcttctgaccactacctccttctatattgcgtgagtcaatctacaacacctttaaggcaataagttatcaagaagtatcacttttgacttggagctgatctttatcatccaacttccatgatgcagggaagaaaacaaactcccagcttatcccccaggcttcacctagcacctgcctgagatgtctcacctccaacaagcttgacagtggaaacttgaaggacagttgctattgccacaccttagggcaggtggaaacaagactatttgtgaaggtgagcaaaaccagcaccagaactgcaaatgtacaagaggaatgccaggtctgtgctgctggttgggccatttagtcttgtcaccttgactgtttcttttttttccagtgagttcactgttggcagcctcaaaaaggaaagcaggggatctgtgcccctggtgaacaaaataatccaataatgaaagaaacttctaacagccaattttccagagatagccaggaccaactcgctaaaaaaggcttttctaaggcaaacagctttacatatgcaaagatcattagctcatcttcaaaaagggaaaaaatgatagcagtgcttctgacgtcctccaacttacaaacaggtatgtgttctacttttgcatctttattttccattttaatcttatagaaattcgacagctgggttttggttcatggaacagaaccacaaaatacaaaaaattagctgggcgtggtggcgggtgcctgtagtcccagctactcaggaggctgaggcaggagaatggcatgaaccaaggagccggagcttgcactgagccgagatcacgccactgcactccagcctgggcactgagcgagactctgtctcaaataaaaaaaaaaaaaggagaattctaaaacactgtaatgtcttgacacactaggatgctacttaggtttgaagtgcaaccaaataatttgctcctaatgacaaatagcaacatttgcaaataattaactttttaaaatggcttggagtggacttgaattacttttataatgttaatgtcatgctcttgcattctacggtttttgttttgttttgtttttcagcatgtgagaaaaatcttgacattagaactcatgttcctggaatcgtgcatctccctgcattcttccagtaggagtgtttcacttggaaatgtcaatgcacttgtagatgaagaattgctagtgtgatcactacaagcccatagaaatataatgtgagccacaaagttaaatcatgtatatagttttaatgtttctagtagtcacatcaaaagaagtaaaaagaaacagataaaattaattttaataatatttttattttacccaatatatccaaaatattatcatttcaacagaatcaatacaaaaaaacatatgagatatttctgcattctttttaaatactaattccaggaaatctggtgtgtacggcaatcttaatttggactggccacattttcagagcccagaaatctcgtaaggctggaaatgaccacattggacatctcagttctagattgatttccttaatttatggcaagaagtagaatcccaaggcccaaagtaacttgcccaaggttctgaagctgattagcagagaaaaggggaggtaatctatgcactgggtttcacactagcaagtcacagcacctccattatacagaagttgttgttgatttaagtatttccctcctaagaaaaagctaaataagaacacaccaacttggccttagggaaatatagtgtgatgattaagaacagaggctttggggcaagaatgctgggattcccaccctggttcttctatatactagctgtgtaatcttaaccaggctacttagcttctcagtgcttcagtttccctatctgtaaagtggggatgttaataacactacctgtttcttaaggtggtataagaattaaatgtattaacatacacatatgtaatcatacacatatagatgtaacatatgaaactcagaaaagtaactggaacatagaaactattatgtaggtgtgggctatatattactaatattgtccaaaattttatgagaaacaatttgggatgagtataaattatgatcaaacccatatgcttctacctgacagtccttcactatattagaagaaaagggtgtaaatgtatcaccacaatgtacttattaaagtgatagattttagagaatttttattttaaaaaatgttttcgccaaaatgagctcccaagtgacttttttaatcaaaaaatctaaatataaacctccccgtactcccagtaattgggtttttattaaggtgttaatatattgtttttgcagtgtttttcctgatatctaaaaggaatgcagttgagtttaacattcaaaaaggcacacatttgtatctgaaatctaacacaaagcacaaaaatcatgattgccagattcaacatggatcaaaaccatttatttactgcctagtcagtacaaaataaggcctacagctgaagttcctctgaagtctgctttacagctaggaatcgtttttggattctctctctctctctctctctctctctctctctctgtgtgtgtgtgtgtgtgtgtgtgtgtgtgtgtgtgtgtgtgtgtgtgttttaaaaacttagggaaataaaggtcaaaataattttctttattccaaaaccagaaaatcatcctgaaaaacatgtcctaaaaataataacatctgattaccaaagaaggtcactttatctaagggattttagtagctgatattgtttgggggaatttctcaggtgaatttattgtgggtaggttgtgaaatggggtcatagtcccatagtttattttacaaactttcttacactgaaccaaactacagaaatatgtaatttcacctcagctggcgacatttgttctcagaatccagaaagtttttatgtgctaaaagtcatattatttctcagggactatactattttagatttatatatatagtgcctattccctgaattggctaaagcccttttacatatcagtaatgctatcctttgaacccaaagataaccccttggttggtggtgctttcaagaatggggacatttggggtgagttatggtggccccaaaatcgtttttcatagcatataactgtcaaactatgcctttgggttatcactgggcctgctggtctcactgccattgctcactgggactacttctttgtcttaagtagcccatggctgcccacacaaaaataatagtaataataaagtggggtatgactgcttgctgtatgttagatttttcttcttcaagctgggatttaaacacatttgcctatgatgatatgttattatttgcctccacaatgcagctcttttctccttcttgattccagtctactctcaatgtaccttgacatagacttcagtgaccttttgatatctgttcctcaggtctaaaggaattcttcagtggtaagcatcattgtaatgtttgttgattgtcaacattttatagcctggctagaaatcttactgtttatttttcaccagtgacttgaagaagatttggaaaatcaataccttattttctttccaactcatttgaagcaaaatagcacaagtaagaaacaatttcgctaataacagcaattcagggataggtacattaagtacattttcaggctcataggtacagtcagtgccaaatcataatcagtactcttcttctcactagcattgtagagggaagactgctagatttaggatccaaggaggtgaagacgatttcttttgcactgcttactgactatgtgactctggcaaatcccagaatttttctgagctttcattccctcatacataaaatagggcttaggactccagtaggagtcattttgccttcacagctgagctgaccctttcttagtgacaacaatccattctcacttcatatcatatggtggggctctcagtgatggggccaaagccctgccctcagcaggacaagcgacatactctaatccaatcacagtcccttccccgaatttacatcttgagtggagattcacagaatggcgagtgaaggagctgagccactttgtaatcccatgaatcctggctattttactgagtgagggcttacaaattgccatgtgctgttccatgtgttctacataaattaccccatttagttctcacaaccactgaacttaaatgtttatctatgagacagcatatcattgtcttaaatcagatttctccaaaagtagaacccatggcagaatttggaaccacacagtttctttgagaagtaattccaggaggcatcagatgtcggtggtgagacaaagaaagtagaaaaggccataaagattatattaatgatcctgacacagcttttatgatgtgccctatgcattgtaacctcttcaaggatcctaaatcatgagcaaaactaggtatttagatgctgcatgtgagtggatttttgtatgatattcttttatggtgttttgtagaaatcaagggagaatgacttttatgtttggttcagcatagcattccacagagtggtataagtgaaaacagtagctcagaaacagaagataccgtacattttttaggacttatagaaatcatgcggcgaactttgagatttcacaggctatggaatgggaagttaagaatataaaattgggggcagcactgtttttttttctttctaaatcatcaagatctggtaaaccccagataatgtcaaacttacattaagacaaataaacacaaagccatatctgcacatctactgaatttttgtaattcatgtgtattcaaatttgggtccatggtaaagaataacttctggttttgaggagccaagatggccgaataggaacagctccggtctacagctcccagcgtgagcgacgcagaagacgggtgatttctgcatttccatctgaggtaccgggttcatctcactagggagtgccagacagtgggcgcaggccagtgtgtgtgcgcaccgtgcgcgagccgaagcagggcgaggcattgcctcacctgggaagcgcaaggggtcagggagttccctttccgagtcaaagaaaggggtgacggacgcacctggaaaatcgggtcactcccacccgaatattgcgcttttcagaccggcttaagaaacggcgcaccacgagactatatcccacacctggctcagagggtcctacgcccacggaatctcgctgattgctagcacagcagtctgagatcaaactgcaaggcggcaacgaggctgggggagaggcgcccgccattgcccaggcttgcttaggtaaacaaagcagccgggaagcgcgaactgggtggagcccaccacagctcaaggaggcctgcctgcctctgtaggctccacctctgggggcagggcacagacaaacaaaaagacagcagtaacctctgcagacttaagtgtccctgtctgacagctttgaagagagcagtggttctcccagcacgcagctggagatctgagaacgggcagactgcctcctcaagtgggtccctgacccctgacccccgagcagcctaactgggaggcaccccccagcaggggcacactgacacctcacacggcagggtattccaacagacctgcagctgagggtcctgtctgttagaaggaaaactaacaaccagaaaggacatctacaccgaaaacccatctgtacatcaccatcatcaaagaccaaaagtagataaaaccacaaagatgggaaaaaacagaacagaaaaactggaaactctaaaacgcagagcgcctctcctcctccaaaggaacgcagttcctcaccagcaacagaacaaagctggatggagaatgattttgacgagctgagagaagaaggcttcagacgatcaaattactctgagctacgggaggacattcaaaccaaaggcaaagaagttgaaaactttgaaaaaaatttagaagaatgtataactagaataaccaatacagagaagtgcttaaaggagctgatggagctgaaaaccaaggctcgagaactacgtgaagaatgcagaagcctcaggagccgatgcgatcaactggaagaaagggtatcaacaatggaagatgaaatgaatgaaatgaagcgagaagggaagtttagagaaaaaagaataaaaagaaatgagcaaagcctccaagaaatatgggactatgtgaaaagaccaaatctacgtctgattggtgtacctgaaagtgatgtggagaatggaaccaagttggaaaacactctgcaggatattatccaggagaacttccccaatctagcaagacaggccaacgttcagattcaggaaatacagagaacgccacaaagatactcctcgagaagagcaactccaagacacataattgtcagattcaccaaagttgaaatgaaggaaaaaatgttaagggcagccagagagaaaggtcgggttaccctcaaaggaaagcccatcagactaacagcggatctctcggcagaaaccctacaagccagaagagagtgggggccaatattcaacattcttaaagaaaagaattttcaacccagaatttcatatccagccaaactaagcttcataagtgaaggagaaataaaatactttatagacaagcaaatgctgagagattttgtcaccaccaggcctgccctaaaagagctcctgaaggaagcgctaaacatggaaaggaacaaccggtaccagccgctgcaaaatcatgccaaaatgtaaagaccatcgagactaggaagaaactgcatcaactaatgagcaaaatcaccagctaacatcataatgacaggatcaaattcacacataacaatattaactttaaatataaatggactaaattctgcaattaaaagacacagactggcaagttggataaagagtcaagacccatcagtgtgctgtattcaggaaacccatctcacgtgcagagacacacataggctcaaaataaaaggatggaggaagatctaccaagccaatggaaaacaaaaaaaggcaggggttgcaatcctagtctctgataaaacagactttaaaccaacaaagatcaaaagagacaaagaaggccattacataatggtaaagggatcaattcaacaagaggagctaactatcctaaatatttatgcacccaatacaggagcacccagattcataaagcaagtcctgagtgacctagaaagagacttagactcccacacattaataatgggagactttaacaccccactgtcaacattagacagatcaacgagacagaaagtcaacaaggatacccaggaattgaactcagctctgcaccaagcagacctaatagacatctacagaactctccaccccaaatcaacagaatatacatttttttcagcaccacaccacacctattccaaaattgaccacatagttggaagtaaagctctcctcagcaaatgtaaaagaacagaaattataacaaactatctctcagaccacagtgcaatcaaactagaactcaggattaagaatctcactcaaagccgctcaactacatggaaactgaacaacctgctcctgaatgactactgggtacataacgaaatgaaggcagaaataaagatgttctttgaaaccaacgagaacaaagacaccacataccagaatctctgggacacattcaaagcagtgtgtagagggaaatttatagcactaaacgcctacaagagaaagcaggaaagatccaaaattgacaccctaacatcacaattaaaagaactagaaaagcaagagcaaacacattcaaaagctggcagaaggcaagaaataactaaaatcagagcagaactgaaggaaatagagacacaaaaaacccttcaaaaaatcaatgaatccaggagctggttttttgaaaggatcaacaaaattgatagaccgctagcaagactaataaagaaaaaaagagagaagaatcaaatagacacaataaaaaatgataaaggggatatcaccaccgatcccacagaaatacaaactaccatcagagaatactacaaacacctctacgcaaataaactagaaaatctagaagaaatggatacattcctcgacacatacactctcccaagactaaaccaggaagaagttgaatctctgaatagaccaataacaggctctgaaattgtggcaataatcaatagtttaccaaccaaaaagagtccaggaccagatggattcacagccgaattctaccagaggtacaaggaggaactggtaccattccttctgaaactattccaatcaatagaaaaagagggaatcctccctaactcattttatgaggccagcatcattctgataccaaagccgggcagagacacaaccaaaaaagagaattttagaccaatatccttgatgaacattgatgcaaaaatcctcaataaaatactggcaaaccgaatccagcagcacatcaaaaagcttatccaccatgatcaagtgggcttcatccctgggatgcaaggctggttcaatatacgcaaatcaataaatgtaatccagcatataaacagagccaaagacaaaaaccacacgattatctcaatagatgcagaaaaagcctttgacaaaattcaacaacgcttcatgctaaaaactctcaataaattaggtattgatgggacgtatttcagaataataagagctatctatgacaaacccacagccaatatcatactgaatgggcaaaaactggaagcattccctttgaaaactggcacaagacagggatgccctctctcaccgctcctattcaacatagtgttggaagttctggccaaggcaatcaggcaggagaaggaaataaagggtattcaattaggaaaagaggaagtcaaattgtccctgtttgcagacgacatgattgtttatctagaaaaccccatcgtctcagcccaaaatctccttaagctgataagcaacttcagcaaagtctcaggatacaaaatcaatgtacaaaaatcagaagcattcttatacaccaacaacagacaaacagagagccaaatcatgagtgaactcccattcacaattgcttcaaagagaataaaatacctaggaatccaacttacaagggatgtgaaggacctcttcaaggagaactacaaaccactgctcaaggaaataaaagaggacacaaacaaatggaagaacactccatgctcatgggtaggaagaatcaatatcgtgaaaatggccatactgcccaaggtaatttacagattcaatgccatccccatcaagctaccaatgactttcttcacagaattggaaaaaactactttaaagttcatatggaaccaaaaaagagcccgcatcgccaagtcaatcctaagccaaaagaacaaagttggaggcatcacactacctgacttcaaactatactacaaggctacagtaaccaaaacagcatggtactggtacttaaacagagatatagatcaatggaacagaacagagccctcagaaataatgccgcatatctacaactatctgatctttgacaaacctgagaaaaacaagcaatggggaaaggattccctatttaataaatggtgctgggaaaactggctagccatatgtagaaagctgaaactggatcccttccttacaccttatacaaaaatcaattcaagatggattaaagatttaaacattagacctaaaaccataaaaaccctagaagaaaacctaggcattaccattcaggacataggcgtgggcaaggacttcatgtccaaaacaccaaaagcaatggcaacaaaagccaaaattgacaaatgggatctaattaaactaaagagcttctgtacagcaaaagaaactaccatcagagtgaacaggcaacctacaacatgggagaaaatttttgcaacctactcatctgacaaagggctaatatccagaatctacaatgaactcaaacaaatttacaagaaaaaaacaaacaaccccatcaaaaagtgggcgaaggacatgaacagacacttctcaaaagaagacatttatgcagccaaaaaacacatgaagaaatgctcatcatcactggccatcagagaaatgcaaatcaaaaccactatgagatatcatctcacaccagttagaatggcaatcattaaaaagtcaggaaacaacaggtgctggagaggatgtggagaaataggaacacttttacactgttggtgggactgtaaactagttcaaccattgtggaagtcagtgtggcgattcctcagggatctagaactagaaataccatttgacccagccatcccattactgggtatatacccaaaggactataaatcatgctgctataaagacacatgcacacgtatgtttattgcggcactattcacaatagcaaagacttggaaccaacccaaatgtccaacaatgatagactggattaagaaaatgtggcacatatacaccatggaatactatgcagccataaaaaatgatgagttcatgtcctttgtagggacatggatgaaattggaaaccatcattctcagtaaactatcgcaagaacaaaaaaccaaacaccgcatattctcactcataggtgggaattgaacaatgagatcacatggacacaggaaggggaatatcacactctggggactgtggtggggtcgggggaggggggagggatagcattgggagatatacctaatgctagatgacacgttagtgggtgcagcgcaccagcatggcacatgtatacatatgtaactaacctgcacaatgtgcacatgtaccctaaaacttagagtataataaaaaaataaataaataaaataaaatgtaaaaaaaaaaaaaaaaaagaattcaaagacacagataacaaaaacaaaaatagaaaatgggactatattaaactaaaaagcaaaaaaaaaaaaaactgaatagagtgaagagacaacatgttgaatgggagaaaaatatttgcaagctattcatccaataagagactaatatccagaatatacaaataattcaaataattcagcaatttataaaaacaaataatttaattaaaagtgggcaaggaacatgaacagacatgtctcaacagaagacatacaaatgaccaagtatatgaaaaaaatgcttaacatcaccaattatcagggagatgcaagtcaaaattacaaagagatatcacctcaccccagttagaatggcttgttgttagaaaaacaaaaataacagatgttggcaaggctgtggagaaaagggaactcttagacactgttggtgagagcataaattagtactgtcactatgggaaacagtatggaggtttctcagaaaactaaaaatagaactaccatattatccaacaatcccactttgtggtattgatccaaagaaaaataaatacatatatcaaaaagatacctgcccttgcatgtatactgcagcactatctgcaatagcaaatatatgaaatcagccttagtgtccatcaatggatgaatgaataaagaaaatgtggtatatatacaaaatggaatagtatttagccattaaaaaaagaattaaatcgtgtcatttgcagcaacatgaatggaactggaggtcattatgttaagtgaaataagccaggcacaaaaagacagatatgatatgttctcacgcttatgtgggaaccgaaaaagttaatctcatagaggtagagagtgaaatgatggataccagaggctggaagggtgtgcgggtaggagtgggggatgaaaagaggttgatcaatgggtcgaaacataaggtcagatagaaggtgtaagttctagtattcaatagcagagtagggtgactatagttagcaacaatgtgttgtatatttcaaagtagccagaagaaagaacttgaaatgttctcaatacatagaaatgatgaatattcaaggtgacaaatactccaaataccctaacttgatcattacacattctatgcatgtaacaaaatattacatgtaccccatatatatttaaaatattacatatcaataaaaaagaaggctgggcacggtggctcatgcctgtaatcttagcgctgtgggaggctgaggcaggcggatcacttgaggccatgagttggagactagcctgaccaacatggcaaaaacctgtctctactaaaaatataaaaattagcttggcatggtggtacacgtctgtaatcccagctactcaggaagctgaggcatgagaattgcttgaacctgggaggcagaggttgcagtgagccgagatcacaccactgcactccagcctgggcaacagagcaagcctctgtctcaaaaaataaaataaaataaaagagaaattaagataaaggcttggtaaagacaaatcaacaagaaagaatacttgcattgtgttaacagtacttgcacaaaaattgtccaggtgtcatctggggtgtctctaaatcttcagagctaaatttttcatgtttccaggctatcctcaatagaacatcaaaattttcccccaagacacctgaaaaattcagggatgcttgcattcttagtatacccgctctaaactcttgcatctgccaaagaagattggcttgccatcctatatatttgctatgtatatacccatatacttatgtgtacacacacacacacaccacctacttactcccctacataagcttatatgtagaattcattcctatcaacttttaaggaactaacaagaaaactaaaaacacacatattgcatgtttgtacacaacagattttatttgaaaagtttggggcttatattttagccatgaaatcaacttcatgtggaatatataaaactcagttgcaccactataattgtctactggctactgcatttcatgttattatccctcccttacactatatccctgatatttcccttttttaaaaaattatttctcattaatccctaaacccatattcactctaggaattcaaagttttctttttccctcactcaagtgtaatagtggctcttacatcttggagtacatatgaaacttatttaatgtaacaattcttagggccaaccaaagactagaaatcagatttagggtgggactctggaaactgcccttttgacaagtatattagatagtcgttttgcagctgtcccacagaacacattttgaacaaagatgtcaatgactttggttctatccacctatcacacctaaactcagatccatatccacctttgttcagacgaacaaaagtacccttccatttaataagatctgcacacttcagaaggctgatgaagttgtagacagcaatgctaccccgctctcctgtagttagaaacacttcttacaaaagcctatcttgttgagaagacaacctgccatgttccaggcagattataggtttcttggaaagtacaaggattagttagagggcatttttttgtatttccaaggcttcacagtactctgagggaggctgtaaatggtatttttgcccagaatgcagagcaaagcaggatcaatactgtgataaatagtggagtgtagtggaaagacaagacaggaaaaaattaattccctctaggcaaatacgaaggctgcaaagaaattctccagtagacaacagataatgggaggatgggagcattccagccaaggggatgcataagcaaaggccccaagtacggtttctacaacacattctaaaaatggagagtaaattcagtaggcctaaactgtagctgtgatggaagctgaccttaggaagggaagactttctatgccatggaggaatttaaattttattctttataccatatatcaggtctataaaagcagtcatggtgatgttaaaaaaataagaaactgatcatagtaatgactgcataacattgtgaatgtgcttaatgccaccgaattgtacacttaaaaacagttaaaatggttaaattttatgttatggatattttaccaaaattttttaaataggaaggaaaaaatcagcaatcaatttgggatgaaacaaaaagaaggtttctggtgagacctaaacatcacagagagggaaggatttgaaagtgtcagagcactcactccgggctgtttgagagatactagtgaacacatggaaacaatcctggtaagagtgattggtacttataattaaattaaatctaaagaaaattacttattggaaagaattgactgtggctactggcaaatggagatccctagacttaaatgaattatattctccaaagaaccactagtccaacttaaaaaaacagaaacaaacaaaaatctctaccggagacttaaaatgacattcggggcacccagtgttctacgagcaggtagcaaattgaaagagttgctcgaccccaaaaagggcataatctacaatatccattacaaatgtgaccaagaaggacaatggaagaggaaagatcttcagagaagtgagtcaagagtcttgagagcaaaagagttacttccaaggagcagcactggtgcataatcaaggaacatttcttaccccagaaaagggagacttccagcatttgttgagcagaatttcagatttgctctaaaccagtgactgctccatgcctcccatccttctccctgatgaatggaagtgattgttttgactttcctgtccctattccaccattatgcattggattttccagtgcagagatgcctataaaatcctgggctttgagccggatgtcacaattggatgagaccttgcagtatgttccatggggcctttgagtgtagtttgtaggcataatggaaaaaggaggagatttgtgattaagaggacagactaagatagattatattcgtattcctaatatttactctcacttccataagaagcttatacacctcggcatattgctatgacatacaatgtttgtgtgagaaagacatgtctgcatacctgcctctgtaggggctggaccaagtgacatgctttcgccaacacaatatgggcagatgtaatgtttgccaccgaggagtttaagccttaaaagtgatcatgtgtttcccccatctgtcttgctctttccctctgccagtgaatatgcacttctaaatagtgagaaaatgtggaacagagttgggcaagtggcagcagccagctgcacctgcccaaaagtaacaaatgtttgttgttggaaggcactgagatttggaaattaattgttaccaaatgaaagcaaactaatgaagaaatctaactctcataagaaggtttcacataagtctgttgcagctgatactagtatagctacacaagcttttgtggttgttgttgctaatatttacctggtgcacatttatctataatttttagacctctctactcatgtattagacatgtcttttgtagggaacatatagcttgagcaatggttatcaaacttgagcatgcctcagaatcacctggagtgcttgttaaagaacaggtctttaggacccagcaccatagattctgtttcagtaggtccggggtgggtttcggaatgtgcatttctaacaattttccaggtgatgctgaagcggctttgcccaaagatcacaatgtaaggaccactcagctagttgtttccttttttatttttatcttgcctgacaatcttttcctgaaacatttaacccatttttagccactataattactactatatctatatccatgtctattattatttctgagtttatttatattgtttttgtgtgtgtgtctttgtaggccaccttttctgttgcttcatctttcttactttgtttaggtaaatttttttgttttttaataacatagaagtcatacattctgcctctcttcttctattggtttccctagaaattgaagaaactaagttactaaagtcaaaagtttgtcagtatctttgcacatcgtccagacaaaacaaatactttaaacacaataaattcaatcacttctctttttgttattattatcatgtattatatctttttaaaaaatattttgcaaattatgccttataaaatttctatctggaatctgaatcttgaatttcatcagaaatacatcctctagattttattttacaagactgttaatgattaaccatatttctatttacacattttaacaaaccttattttcactgtgaaaagatcattttaagagagaattctaggttaactactattttctcccagatcattgaatatatttgttgactatcttctggtttccattggttttactgtaaagtttgcagttggttgtctttttcactaagttcctttgaaaatctctttgccatggattagtataattttttcattttattctgttttaaatttgttgggcatcctaaacctgaacatttttgtcttactttagttatacagaagtctctgacagtgttctcttcttcattgtctttctaagctttattctaaatacattttcagatctatatctcagttaaaaataatattctcttcagctagatttaatcttcactgaaatccatctactaacttttaaaactttataattatatatgtatttttatgtctagaagttctatttggttttaccaaaccttattatttctatgagtttctttcttcttcctcatattttcactcatacataaattattaaaatgtattaaatatccattttatatctcagctggataattgtaatatctgaaggatttgctgaactaattctctctcctagcatttgttttcttttgtgttttaaagttatgacttgtgatttcatacccataatagactgaatgcttgtgttctttttaaaatctatatattaaaatctaatccccaatgtgaatgtatttgaaggtgaggcctttgagaggtgattaggtcatgagggtgaaaccctcatataagggattagtgtccttattagaagactccaaagagttcccttgcccctctttccaccatgtgaggatacaaggggaaggcggctctctgcagcctgaaagagggcactcacccggattcaaccatgatggcattctcgtctcagacttccagcctcaaggactgtgagaaataaatgttgtttaagccatcccattctatagtaatttgttatagcaagcagaattgactaaaactataccctcaggatgttttacatggaacttctctgagatgtgagttgaagctgggtctctgccctcactcaaagtgtgatccatgggtcagcagcagagggttcacctgtgagattgtaagacctgcagaatctcagccccgccccagacctcctgaataagaatttctattttaatcataacctcatgcacaggagaatttgaaaaaggatagctaagggagaatttggatttctggggcttttttttttttagggcttttttgcaaggtacctggaggaatcattgcaccttacatgaaattctaagctggaggttttttgggatcacacaagttatatcaattcaggatgcaaactcttgtgcaggctggttataaattctccaagatgtttttctcctttcacccagaaccacagttcaaaaggggcaaatttcctagcagttctcttagggagcaggtgggcagcatagatttactaatagatcccctgacagcaagggggcagtccattatagtgccaattttgggagcagagataaacctaatacactgctccatggtgtggtgagggccgaaggctgtatctcctaattcttgcatgcccagaaggccataaaatccgaggctccacatcacgtagattcaacaaatgccttctggacaaacttgcttctcctatatcctgcctgactcctacctgcactaagtttttagcttttgaatattctttcttcttatcggttcagtaataaatttgaacatactctgtttttcaatacttctgagtatttatttttgttctagcagaaaggtcgtctagagtaaccttacatactccaagaaacaggaactccagccttaagactcactttcatcatgaaggagaatgcacacccagggcagagacggtgaaatacttaactcgatgaccaaaagaagaagaaaaccaatcgagaaagccttttgactcctccctattgtttaatgcaagttcctattatgtctttatctggggccaagcacagtgcttctcatatattaccttatttaaatctcacatcaccccatactcactctaattatcgtcatcctccttccacacatgaggaaatggaagcccaagagggacagaattttctcaaggtcacctatccacaaaggactaggatttggacccatggtcacctgagtccagtgcttgcttccagtgttatgctgctattctgaaaccgctctaccctacctcctgatggcagcagcaggctgtccagagcagctgttgccatcatgtcagccactgcagggaggacaccagggaggaggcacagctgggtcaagggttgtgccacgctccagagggccggtggaagcccccctggagaccactgccctgggggccactgtgatggcgcagggaagggcgggcagagaggggctcagtgaggacctggaacccccaccccaggctgagaaaaggcatggccagggctgcctgcacactctatggagtgagcaggagccctgctctcccaggcacagggtccctctctgcactctgcactctgcaacctcgggggccccaggccccctcggcctctcaggcttgggggtgtctcccactgcctgacctccccctactcccagagcctgctctgatctcggaatggagttggggccaagcccagttgctgtcacagcctgatcagatgtgcacacatttggggcagctctgacacaccacccccctgccacctcagccccctccagagtttggggtccaacaagcatgggggagaagctgaggtggggttgaggtcagcttggcactggcctgcatgtgccccttggtgcgagcagcctgggtgcgatggacagtggcaggatgcagacaggctcctgggtggaaggtgggggttccccaatgaggctccaccttcaggccaggaagggcctgagggttatgggcccagcttccagtgccagggtccggagtgggaacttatggtgccttctcctgatccacccatggctgcccatggactaatgggcatgcacttcctcccttctgaggcccataaaagccctagactcagttagaactgaacagacatgggacaaccagctgtggggaggaactaccaatctgctgagagctggaacagacaatgggaggactggctgcagagaggagctaccctctctgctgagagctgaacactcattgggacgacctgcctagcagagaggagctaccccctctgccaggagctgaacactcatcaggacaccctggctatggagaggagctgcctgctaaaggtttcctctgagctgttctattgctcaataaagctcaacttcaacttgctcacccttcagttgtctgcatacatcattcttcctgttcacaagacaagaatttgggacccaccaaatagtgaagataaaaaatctgtaacacgaacaaggctaaaacatgcctcttgcttaccatgttacaggtgaagagaaagagagaagagctgggtggtccttcagagagcccagacctgggagctccccaagccagggccgtgacttcctctttggcaaatagtgacaagaatcaaaggaaacagaataatggaatcctatgattgcaactaaagtaagtaaggagaaacgtgatgcccggattatgagttatttttgtccgtagatgtttattccaagaactgccttgatagatgcagtttaggcaacaggtaattcttagagatgattaattccaggtggatcaaaccttaatatccttttgaggatgattcacttcaatttactgcatcattacttttaggaggcagcaaatgataccaaatcctatacactcttgcacattcactccagcttccctcccaagttgaaaaccatttaaaaataatttgagataaagttcagtcagttagctagttacagcattctcttagggtagcattagcattaattaatgcttgcagattgctttgaaaatcacaaatgctatggaagtgctgactattaatttagcaaaagcacaggccatgaaagttgaaatttgaaggcagttgcacactgatgaaatgttttaatacttaaatgaaccagcctgaagaaagtctctgacatcccatgtttataaatcatgaggaaaagaggtttaaaatggagagatttaaaatgagatttagaagagagtactgaagtggaagtgaatgggaatgactgttgactataagaagagagtaacaaaccttagggatcatcaaaatcacaatttggggtttctacattcatcaattgggaggtcccccttgtgctggtaattggcagtaattcaggagataagaaaagggggagaataggaagaagagcaacagaaaaaacaaaaaatattaagcggaagaagaagaaaaggaagacagagacaaagctgaggaagaaaaaggagaaaacttatttaatgagatgctaatgaaatggcatttctccagtgcgagtcagcccaaggagcagttatatcccaataaggactccaaattgaaactactgtctgactccatcgtcacaaacagtcctctccaaatttctcctcctttcctggtttacctgtggatctgaatgagcagatcttgtgtcccttccttttgcaatcatcacatggcttcttgagataggactggcatcctatgcccctcctcatcctcatcctatgcctccaccaagacacttaggaaggactggttctgctgccttccacacatctctgtgtgatctttaactaattctttaggactgtccttggtgttcaacttctccagtgaggtcagcaacattgggcctttgtccccatatctgtgctgctctgatggctgagacctatatgctcttcccaatgaagatttccaggaaagtggatttccatggctgtgaagatagctgaactatttaacttgttccctggaagaaactttctccgtaattttgttgtggtcctacaggaaggtaagaacatgaattaaatgagcttatatagcaatctgtgatgttatagaaaaagctccttatagaatagataagagattacctcccctacctctctccttccacttttctttatgtctttccttatgttacattaattttttattttaagcatatcatatatttgtattgcaggatatttagaaaataaaaaatgcataaaaatttaaatttataagtgtgtgtgtgtgtgtgtgtatatatatatatatatatatatacacacacacacacatatatatatatatatatatatatatatatataaactataggtcatctacccaggcatattcatgccttgcatttagtcatagtgtctgccttatattgatgtatgtttatattatatataataatattgtatggatatttttatattttataattatttaaattgtattatataaatataaattatgtttgtactgataaacttacaaatatgttatatttttatttacaaacatatgaatataaattattaaaacaattatattatttatatgttatatatttcatttacattctgttaaaatataaatacttgaaaatatttatcagatataaatacttgtattttcataatttatattcatataaatattcttataagtatcagatacaaatacttgtatttataagatataagtataaaatgcaagtatttatattttaatattaatattataaagtattttccattcatgtcttcataatggatgcttaatattgtgtcatgtgggtatatcacaacttttgcttaaacttgcaattgtatttttagttttctcacagtatttatccttataaatgattttataaaaaatatctttgggtgaaaaattttaaaagaatttttattaaatgagacaaggctcattttcaaaaatatcattcaaattttatgttttctaattgtctcttttttttttttttactgtggctctttctgtaagttgtcaaatatacaattggacaaaaagttatcctaatcagggtaatcaggtaatctttgtgagtttaaggtaagaaaaacttttcgtctatcctcttaggttccattgctggaacctgtaaattaaactgacaaaaaagaagaaaaagtttacatgcacagaagcttcatataaaagaagtaaaaatctaaaggagtggttagacttggggacttatatgctgttttaacaaatggcaatacgttgtggaaagtgactagacaaagaaaagagattttgggtttcaagaggcagtaacttatgggaaggtaaacatatgaggtaaattagtgataaacaaggtttatttagtaaggtttgcttacgtagactcatttcaatgccatctctggtagggagccatctctgaagtcatttttctcttcctggttctggagagagggacaccaataaaaatggaaatttctgccttgcatatagtcagatggaggaattcagacagctctttctaaatctgctctttctcgactctcttcagctcaaaataatccttatgccaatgtagcatattttgaagtggcatattctgatcccctccatgagtatgataatcacatttcaacagaatttggattctgatcagagatttcgaagcttatttaaagagcaaaacaaaatgaattaaactctttctaagacatttgttaaatgtccaaaatatgtcagatgctaagcacaccaagatggtgctagagaaatcaagatgaatgaaacatggtccctgtctgtgaaagtcttctgatcttttatttggcctgtgtagcacgttgattgcaaaaagggacataattcttcccctctctgtatttacagtatttatggcactgaagcattttatatctatttctccacccttgagtcttggatggcatgtgacttgcttttgtcaatgaaatggaacagaaatgtcagtatgctggttccaccttgagcctcagagactgggtgcacctggcaacccctgggaaccttgctactggcatataaacaaacttaagctagcctgctggaagatcagaaaccacacagagcagagaggaagtggcctacagaggccaacttgaacatccagcccctagccaagctggcagttgaccataaacacatgccgtctaaggccagaagaattgcccaactatgtccggagttgtgcactaaataaaggtcatttgggaaggttggtaacatgaaagatactaattgatacagcctgtaaaccaattgcaccaatgtgcttagtgtcataatagaggaagaagcaagaagctataagctgttggcttgtccttctgcttcagctgcttttgatcttgttgacaacacagtttaagataatgagggtcaagatatcttgaagagggggagctttctacgaaggagtaaaaacattctgataaaggagagtctgacatatttttcttaaacaattttaactcctcacatgtgcctttcctgggcaagggtgcaaggttacccaagcaatagaggaaactgttgttgaactgagctacaaattctcttgtttttggatctggtcatgggtggttattgatggtgccagggaagtaattgcataggcattctggccctgagaggcaataccactgagccatcaggaattgcctaatgtgcctaagttaacaaggttatccaaacagctcttttctgctccaagtagtagctttgaatttgcagctttgattcagttaagccagcatcctcatgctctctgggcttcatctctttggtaagcctataaataattctttctttcccaaacctctctctgttcccatcaaaacttagcaaacaactgggcctttcttccagactcccactttctactatattagtgcaactcaaactttaatgtgcataggaatcacccacagatcttgctaaaatgcaaattcagattcaatagatctggggtagggatcaaggatttgcatttctaataagttcccagatgatgcgaggctgcttctcccaggataacactttgactgttaaggtaccacataacaaatgaaagtatctctactaaccaaaagctagttaatagataacccagagtgcctgatctccattaaaacttcctgctctcattcattcataggcaagtgaacaaccatagcctctgccttcattcggggaggaaacaaaaacttagactaattttgacagttctgtgtgatgaatgcttccataaaagtgcattcccaggtacagtatctttttaagtactcacttgccagaagccactcctaacagggcgtgatggcaggtcatgacataaatgccagaacatcccctcccaattttctcttccctgtttcatcccccactgtcctatttttgatcatccctattccatgatttctgtcttgtatagctcatctaaattaaaatattcttggctaattttcccagatctcccaactcctatttaatttcataggctccaggagctcccacacctatagtaccacatttgccttgttaggatatggctgatttaaatatctgacacctgcttctcctcaaagcagtcttttcattttaaagtgcaggccttaactctctacctggccatgcatccagtagtgtagatcctcaaagctctaggtggattgccggaccagcagcattagcatcacctgggagcttatcagaactgtagactcgcccaccccaccccaatctactacatcagagtcagcattttagcaagattctcagataatttttattgaagtctaagacactctagtgcagaaatttcaaaacacctagctacacctgcaacatgcatttcagggcaactctcacactatgaaagaagaaagactgagtttcaaatctcctccttctagtcactaggtgtgcgatccttatgcccgaggataggtaatagagatcacagctactcgtagagttgtaagtgacaataaagtgagctaagagatacaaaaacatcttgcccagttcctggcacattggtgacatggaataaaagatagagatgaaaaagtttgaaggatactcttgagattaatacacttaagaatagaatgttgccatagcgttgaacattgataagcagtattttataagtacagagtaatatatgtataattgttaagaatgtgcttattagcttggcgtgagatgacttttttcctcaagtgtaaggcatatattttggatattaatgctatcaacacttgaatagtgctagagatgtgaaatcagagacacatttactttgccattgttcagaaagtcacacggctgcttcgtactcacaaatctagcatggcatgtccttccaatacagaatgtagatgtttaaagagccacattactgttgactatggcaatattttgagggaagttacttctaagcatccaaaatcaatggagagtttaaataaactcacttggagtttaatgtttccttggaatcctatttaagtggccatagaaatgcagatctcctttcaaaacgaggttgtactcgagcaacactaatcacttatagaactaagttttgaatatcttgaaatcaacagtaagtgaaaaactcagcatgatcacccattttaatgcataaaaaaccaatacaaagatttatacaaagatttctataaccttaaaccaatgcaaaagagttaagggcctgagatgcaaatatatttttatatcttgaaatcagcaataaagagaaaaaaatcccttcaaattatcactctctttaacatatctctctcaaatgtcagtttgaatatagagaaaagacatcgtgttactttcaaatgccgcgcttatggttcattacactacttcattgactatctctgtatttcctttttatgctaacaggatggaagagataaatctgtcttttgtttccttctttttcataaacagactgttttaatttcaaattactctaaagaaaatatgactctgtgggaaatttcaggccatctaccaaaagtatccaagttgctatttttagattcaaacttttgaaacacctgccacatcagctgttagactaaaccacctaaaattgccaatatttgagcaatttttacccacaaatatggcaattttatgtatttcaatctaatagtttcctgtctgtacactctaaaaagacattccatgttgacattttctatttattgaaatgtcagttaggaaaacagatttttaaatggccaaaaaattaagttattttctgatccaattcttggcattccttgggtcacataaattacaagtccttaatttgcatataaaacttacctgttatgtagaacattcttacactgttcggactaattcttggtagttgtgtcagcagacatgaggtagagcattcttttataattagaagggagacaaaataaggaaatacgatgttcttttaaaatgttttatttgaaaaaattaaacaatacaatgactttaaaaatcaacttctcttcaggtaaatgctttgagccaagagtcttgtatgtgaaataattatattgaaaaagcttgaataccttctcatgcccttaactctacaactccagtttaaatggttgaatgatgaacaaagttatcagaattttgctcaataaatagctggagtgtgtcatagaataaaacagaatcaggccatgattcaatccttttgtgtttgttgtccagcactgtgaaaagtgttgcttttaatgattacacagagaaatgggaaaatcctgaactgccttcaaagccattaaggagattttagtcatgttcagcagagcattagatgtttacgtatttcattgcttctcaatttcctgaaaacttgtaaattgctgatgcttgcaagatgatggtacacagaattaacttagatgtgggctaaccaaaatctatatatactctgaataatgaacaagacattcttctgaaaagaggcctgtaataccccacctttttcaggtgataaattcattccttggccttcacagtatgcgtctatgattcaaagtcttacaaactagaatgcaccattagaaggtgcagagactcacttaccagacccaggagtagcctacgaagctcctcactctaattaataaaacaacacctttcagcctgctctgcagtagacaggaagttttcttatatttaatgaccattcatctggacagaaagccttcctactgagtgttcagagacagaggctcaatttccaggtgaacacaacagacaagcaaggcccaatcatttagaggaaactgatcccacgcccactactttatctaaacatgccactattcgttctatgtggaacattttttttaagtttcaaggaaagttaagaaaaaatagtaactgatgttatcaaaggttcatctgtcaaaaaacccaatgcatttaaactgaatacaaaagcaagcagtgtgctggttagcacatattattatttctttattgagcagtaaatcctctctctcaagcaataaagtattctttgaagaatatctaaacgtgtcagaagggtaagcagttctggcctgaacaaaaaggctttacgaatttatgaatatttcaattctttatggagaagagagaagatataaagcaacaaccaactggagaaagagtaaacagatgtgaagtttactcaaaacatccaggacataaatactttgacacattatctagtccagttgtattcaacataggttccacagacctgcactgctgcaagaactgtttcttacaagtcttcatagagattagtacagaaatattataaactcatataacaattcaactctattttatgtctgttgaatctcataataatatatttggtcttgaattttatcttatttagtttttagtatctcatttgtattatattttataaaaatactggtccacaatgaattggaaatttaaaaaaaaaataaatgaacagcaagcaaacaaaaaaggttttgtttgtttgtttgttttacagaagtttcagtcaatttctggcttccaagtataataagttcttattataggtcaggcattgctaggcacttttgtcctattttttaaagtaccaatgaaatttttatgacttcctttggcattcattttagtacttggtgccctcactaccaggaaagccagacttatgagaaaaccagatttatggtgcactatcatgcaccatagcactgtggatagacatgagaaaaggccatcacattcttcctagtcaattctccattactgagaagaccctgagtaaaaggttgcctgtgttttctatgctcatcttcccatccaccccacttctccctttttgcagaggaaaaagataagaagaacagagaaagtggaattgactgatttttgcctgacgtaaattttaacatagtttagaataataagcaccccacgactaaattgattactcattgttttcttgtaactaccatgaggctggaatcagaattgctttgtccacatttacaataatatcaaaaagaataaaataattaggaacaaatctaaccatgaaggtaaaagatctgtacactgaaaactataaaacattgacgaaagaaattgaagaagacatgaataagtggaaagatattctgtgttcatggattgaaggaattaatactgttaaaatgtccagactatccaaagtgatatataaattcaacacaaaccctatcaaaattccaatggctcttttcacagaaatagaaataaaattctaaaatgtctgtggaaccacgaaagaccccaaatagctaaagcaatctcgagaaataaaaacaaagttggagtaatcacagtatctgatttcaaattgtattacaaacctatagtagtcaaaacattttaaaacatcttggtactggcatagaaacagacacctgaactaatggaacagaatagagagcccagtaataaacacaagagtatacaaaaaactagttttcaataacaacaccaaggagacacaaggagaaaggatagtttcttcaataaatggtgctggaaaattggatattcacttgtagaagaatgatactggacccttacgccacacacaaaaatcaactccaaattaattacaacctaaatataagacctgaaattataaagctcccgaaaaaaaaaaaaagggaaaaactccataaaactggttttagcaatgactttgtggataggacaactcaatagcataaaatgaatagcccagttgaaaaacgaccaaaggatgtgaatagacatttctccagtgaagacatagaaatgaccaacaggtatttgaaaaggtatgcaacatcactaaaaaacagggaaatgaaaatcaaaaccacaatgagatatcgcctcacacctgttagatggctattatcaaaaagacaaaagataacgactgttgacacggatgtagagaaaatggaacccttgagcacttttgctgtgaatggaaactggtaaaatcactatggaaaccagtatggaaattcctcaaaaattaaacatggaactaccatgtgatccagcaattcctattctggcatatgctcaaagcaaatggaatcagcactttgtaaagatatttgcactcccatgtttatcgaatcattattcacaatagccaagatatgaaaacaacctaagtgtctggcaacagatgattggataaaaaattgtgatacacgcacacacaaaatggaatattattctgccttagaaaggaaggagatcctgccatttgcaatatgatgaacctagagacattatgctaagtgaaataagcagaaaagaaaacatactgcatgatctttcttatatacagcatcttaaaaaagcttgaatacataaaattagagtagaaatgtgattaccagaggtagggggagatagggagatgtagacaaaaaggtacaaagttgcagtttttcagatgaatgcatctagagtagatctaatgtgcagcatgtggactacagtacatagcattgtactgtatactggaaatttgctaaggcagtagatttttggtgctcttgccacacacacacacacacacacacacacacacacacacaagctatctatgtgaaatcatggatatgttaattggcttgagtgtagtaatcatttcaatgcaaatatgtatatcaaaatatgatgttatatattacatatatacaataaaaataattttattaaaataattgtggtatccaaagtccacaaaaagtttccaaacacttgaaagaggtcgttttccaaataggtcagaccaggggcaaagcttctgtgttggaagcagagggtatatcttgaaatttggctgattgcaattgctttgtccttcaatctagacattaagggttctcattgttttgccaccagtagaatattttccaaaggcagtgcctctaattaggcatcaattaaccttaattaagacagttcttgcgtaacagcgtacccagagagttcactaaacaaacagcttgacaaacactggcattttaaatcttttccaaacatgtcactttcttaattaggtagtcaggttgtgaagactatattcacagacattatttgggaaattagagcagggaagatggagccagttcctcttcacgctccttaaatgcattggttacagcagaacttgctgctagaaatgcacccataaggcagcaccaggaagaacacagcatttgctccaggtgggaagcacgatggcagcaaattactaaagttagtttcatttttcagggaaagattagaaaataaaaggagaaattttatggaaataatgaaaggacttactattgatctttttcctgtttgtattaagctgaaagtcacacatacattataaatttaatagaaaatgatgacaaatttggtcttttaaactatgtctttgacatattgataatattggatcctatgatttaaaagacctatttccattcattcaagtcattatttaggatattcaacagatttttttatattgagactgcacagttcttattatttcattttttgttgcttttgtaaatgaaatagcttttaaacatatttaattttatcttaaaatattttaatgtaaaatttattatataaaaatgtacaaaatatgcatatgtagcattttaaaaatatatacagtacttatacatttttataacaccagcttaagaaatagaacattaatattcagtttaaatccccctgcattccctccctaattgcactcattttctgccttccaatccagaagtcttttctaaatctgtgctaatcatcttgattatatttagatgttattctgcacctatgtgtattataaacttaaattttgtgtaattctgcacatttttggcatttatattagtggaatcatgctgtaatatttttattatttaattttttccattaacatacttttgactttcatccaaatacatgtaactcaactttgttttcactactgtaagttattgtcacatgactatatcttaaaacatataattattcactctaatgaaatagaacatttggactgtgcagcaggcagaattccgggatggcacccaaataatcaaaccctgatgtatagataccttctcccacttattggatcacacaacaatctaggagctgctgtgaagaggctttgcagatgtaattaaaatccctaatcagttgattttaagttgagaagataatcatgggtggcctaatctactcagatgaatccttatataaaatcagagcgattcaaagcaggagacagtcatatggcaaggaattgctggtgacctgtagagtggagacgggcccccagccaacagccagcaagcagatgagaaccccaaccccacagctgcaagaagctgaattctgccaactgtgtcacagtagcttgagagagaaccccacattagaaataaacgcagcccagccaacaccttgacttcagccataagtaacaaattcagctaggctgagctcagacttctgacctataggacgtgtgagatgataaatgttttaagccatgtaatccgtggctattggttaaacagcaaagggaaatcaatacaagctatgttcataattgtctactttagacaatgctgttctgaatgtttttgtacatgttacctggtacacttgtgcaggagttgaagtcatatacctagaaatagaacagaactatgtagttacataatacacacattactggataatgtcaaattattttccaaagtaatttcaatttatatgtccaccagcagtcatgagagttttcttttgcttcatatccttccccaagcatgggattggcaggatttaagtattttccagactagtgactataaaataatatttaattgttggttttaatttgcaattctctgaattattaatgacggagcattttttcattttcatgggtttttttttttgccatttgcgtttctgctcgtaagaaatgctttttcaagggactcattcttattgatccacaggattggttaattatttcctcactaatttgctgagtcagtttgaattatatcagtttttcagattcctgagtcaacatttggttatctgttatgtgcctgtggtagaatatttgtttatttctatgacatatcatactttattacttatatatccacttatctacctctaatgcagcttgtatttatggttatttggagccctttgctcttccagatacattttagaacaatcttgtcaaattttatttgataaaataaaaatactattgtaaaatgttattttatttcaattatattgaatctgtaagtcaatttgggaacaaatggcatctataatgctgagagtgagtctttactcatgaaaacaatgtctatatatttagttcttctttaatgtcatttttaaggttttataattatttacataaaaatcttccatgccttttgtgaaatgttgtcctaggtaccaaacacattaattgctattgtatctggtatctttttaaaatttttatttttctaacatttattttaagtttaggggtacatgtgcaggatgtgcaggtttgtttcataggaaaacatgtgtcatggtggtttgttgcatattttatttcatcactcatgtatcaagcctattatctattagttattttccctggtcctctccctcctcccaccctctgccctctgacaggacccagtgtgtgttgttctcctctttgtttccatgtgttcctcatcatttggatcccacttgaaagtgggcatatgtagtgcttggttttctgttctcacattagtttgctaagaatagtggcctccagctccatccatgtccctgcaaaggacataatctcattatttttatggctgtatagtattccatggtgtatatgtaccatagtttctttttccagcatatcattgatgggcatttgggttgattgcatgtctttgctattttcatgtctttgctgcaatgaacatacacatgcatgtgcctttataatagaatgacttatactcccttgggtatatacccagtaatggaattgctgggtcaaatagtatttctgtctctaggtctttaaggaatcgccacactgtcttccacaatggttgaattaatttacattcccaccaatagtgtaaaagcagtccttttaaaccactacctcaccatcatctgttatttttggattttttaatagtagccactctgactggtatgagattggtatcgcattgtggttttgatttgcatttctctaagtatcagtgatattgagccttttttcctgattgttagccacatgtatgtctccttttgagaagtgtctattcatgtcctttgcccactttttaatggggttttttttttctcataaatttgtttaagttctttatagatgctggatattagacctttgtcagatgcatagtttgcaaaaaatttctcccattctgtaggtctgtttactctattgatagtttcttttgctgtgcagaagctctttagtttaattagatcccgtttgtcaatgatttcttttgttgcaattgctttcggcatctttgtcatgaaatctttgcctgtgcctatgtcctgaatggtatcctacatttccttctagggttttttttttgagatggagtctcactctttcgtccaggctggagtgcagtggcgtgatctcggctcactgccacctccgtctcctgggttcaagcaattctcctgccttagcccccccagtagctgggattacaggtgcctgccaccatacccagataatttttttgtatttttagtagagatggggtttcaccctgttggtcaggttagtcttgaactctgacctcgagtgatccatccacctctgcctcccaaagttctgggattacaggcgtgagccacctcgtgcggcctcttctagggtttttgtagtttgaggtatttaagtctttaatccatcttgagttgatttttttttttttttttcctgagggtcttactctgttgctcaggctggagggcagtagcatgatctcggctcactgtagcctcaacatcctaggctcagatgattttcccacctcagcctcctaagtagctgggattacaggttcgtgcaaccacgcctggctaatttttgtgtttttagtagagacggggttgcccaggctggtctcgaacccctggactcaagcaatccacctgcctcggcctcccagagtgctgggattacaggcatgagccactgtgcccaaccttgatttgattcttttatacgatgtaaggaaggggtccagtttcaattttctgcatatggctaggcagttatataatatctttttaaattgcatttttctaattgtttgtggataacatttggaaataaaatagactttgtgcattatacccagaaaattcactgaaatctcttttcaaatctagtaattttctgatagaaaattttctttgagacaatcatatcacggggagatcataaaaatttagtttcatcctttctaattttttcacttttgattactttttcttgtcctattatactggctaggacctctgacccatgctggataaaaatgttagtagcaaatgcccttgtcactctcctgattttaaagaaaatactttcaaatgttttgttaccatgatggttaattttatttgtcaacttggctgggacatagtgtccaggtatttggtaaaacactattttggatgtttctgtgagtgtggttttttttttaatgaaataaacatttaaatgggtggactctgggtacagcagattgcccttcataatgtgagggggtttcatccaatcagttgaaagcctgaatagaagaaaagactaactttgccctagcaaagaagaattctgccagcacataaccattagatttcaactgccacatgggatgttcttcagatcttcagccccccaccccaccctgcaggttctgaacttgccaacctgcataattgtgtgtaccagttccttaaatctcatgtatgggtgtgtgtgtgcacgtgtgtgagggaaacaaacacacacatacacaaacaccctcatcctatttgtcctgtttctttggagaaccctgactaatacaatcattcaaaagattttgtggttatttgttaaataaaaatgttttatcacttaagaaagttctattcctattttgttgagaaatttttctggttggattttgtcatgaatggtcattaaattttgtcattttgaaacatctattgcaatgattataaatctgttatacttttctttttcaatatctcaggatagtgaattataccacataataatcttacatataagcaacaaatccaagttggtcaagatgtattatgccctttgttttattatgcagtactggattccatttttattgattttgagtgggaggtgaaagatttgcattcatgttcatgagggctttaattataattttcatttatcctattgtcctaccctgattttgatactaatattttattaacttcaaaacatgagtttcaaagtaccatctttttctagtctctgaaagaattttcttaaatttacagtcgtctagtccttgaatacttggtataactatgatttaaagtaagtagggtaagaaaaagggaattcaaattttctatattctggaaacattcatatttcttggaattatatctcaatttcactacatttttcaatacataggaacccattgctctacgatcacctctattattttattccctgcatcttcaaaaatgcacattttgcattcgtaaagttacttatttgggacttttattctttatatgtcttgttagagggttgtcagtttttatggtattttgaaatgaatagaaattgatattactgatattatctatgttacatttgttttctttttactaattcctgttctttattgcttccttttttgtttttgatttgcaatgctttattctgatgattacttttatttttgtttgatttttgttgctttttattaagttgaaatcttagctcattaatgtttagccttccttctgttctggtatggtataagcctttgaggctatgattttccctgtaagaatcattatctgtgtcacacaaattttaacagatagtagttctgttattatttaatgcaaataaattgctaaatctgaacaaaatcctttgtttcttctcttagtctatgccaacatgtgaacgccccaaatgggattgttttatgttttctgttctgcttttttttttttttatgttgggctgtgcttctgtttcagggctttacctttcatatgagactagtgacaggtccaagggctaccagttcaccaaggaaatctttgattggtcttttcgccgtagggataatagttcaccttttttctgtattctttctaagcttaatgatcatgctaacttcagtagatccacttcccagctaccagttaccagactaagataatgctgatcttaccttgaccattctacctcacttgtttccactatcagtatcctttgatctgtaagtcttcagattctgtctccatgcacataggtgaacattattttattcctgaactttcggtcaaaagatggtgtcttctggacaaggtggaaatgaccattgccggaggaagcaacagaccccctcccgccttgctgtgtccgcctgacagggatttagcaggtcctgtgagaacatcaaaggctgtggagagctgaaggaaagtcacctcatgccttttaaatcctttatctttcttttcaaacctgcaatgtgtgagtattcattatatacaacttgtattcaaatttatgctattcaagcagaaaaaaatgtctttcatcaatcttaaattctttaaatattttctaatcctctacatgtaggttagagtgagcagccatttggaagactggaataatttctcctgatacatggacttgggcaaagtatttttcactaaagtaataaaaatacaattgtagaaacataaacataaaaagggaaaatattaggaagatacagaggtttctgtgaactctgtggtctgttgggactgaggagagtcttggaaacaagagttagaaattaatgtgtttgagcttgaaagtcactttaaatcccaattataaattctcaagagagaggaaatctattgaatgtgagttgggatagatccccactcagtgtctaatcaatgatggcaacagggtgaggacacagagtattgaaagaactttggagatcaattgctttatgtgagggccaatgattcttagagggaaaaaggtggctcttcataaagaggagaattggtcctgcagtcaaatcttaataatttctgccagactttagagggaaaggaaataaactgaaaatgaatagatataatattattttattttatggcagcaaatggaaagttaagatgtgaataatcagtttgtctttaaagcaaagaaaaaagcaacaaacaagagttgatatcaaatcaaatggagtaaacacaatacaaatatataataagataaacacacgcccttggaaacgataattaaagataagatttctaacacatatggggactatctcaaatgtaaagaaataatgtatgaatatcataagcacttacaaatttcataaggtgaaaaaaacattatatgtaagcaagagaatttggctggcctttgatttcttctgtgaaatttagataccaaaactactccgagaaacatctaaaggttttgagtagaaaacctgagattcccataatttaaaattaaccaagtttcctttcatgttcttaaatcaaagaaagatgttttcctccttccaagtagggaggaagtgttctgccaactaagagaatccgtttcctcagtgaataaagtttccactcctctccttacctggcaactcctttttgttcatcatccttcagaatcaactccacggcagtttcttccctgggttcttccctgggttctcaaactaaagcatgatagtgtgttattgtcttttgcagaacaaaatcttttctttcatagcatatttcaaagcttgtatctgtatttctaatgggtttcattgttaaatatcagccttccatattaggttatgagactcacgaggacaggcactgtttctattttgttcaccactgtacacaccgtgcatagtgcagagtctgagagaacacagttactcaatacatgtgatgggaagggaagggaaaaaagagaaaggagtcatatcccttacttgaattggccgtgggaagccacgtggggaaaaaggacaggagcagtaaaaggcaggagggttgattgctggtcccaggatctgattggggttccaagaggtccactataaaaggttttattcccagagagagatggagagaggagtttatgaaaccatagaaacagaaggaatgaaagatgacacaagaatatctttctctaatccccagtaaagatccctttctttcagattattttttactgaataagtacaaattagttcgtgtcccaaaaagaaaggttacagttgataccatgtctttgcatagggtggtctcctcagagttaaaaaggaaaaaaaaagttcttcatactgtgtctgttctgtttaacttcaaccttagcaggaaaatgatctgtagcaaacaacagcatcctgaaagtactaaattatctccagctttcttttttgttgtttttttttgtttgtttttttgagacagagtctcgttctgtcgcccaggctggagtgcagtggtgcgatctcggctcactgcaagctccgcctcctgcgttcatgccattctcctgcctcagcctcccaagtagctgggactacaggcgcctgccaccatgcccggctaattttttttttgtatttttagtagagacggggtttcaccatgttagccaggatggtctcgatctcctgaccttgtgatccacccgcctcagcctcccaaagtgctgggattacaggtgtgagccactgcgtccggcctccagctttctttttaattggggagctctccttacccatgtgagcagttccgggctttgcccttcacaccacatttcctctggctattaaggacctcattgttgaggtcaaccatagtatagatgtgcttataagagtcacagaatattgacattgaggagggggtttgttcataccaggccattcagaactggttgggcaaagtcccaaggcatgagcggcatcctgctactaagacttccttaggggctgtgctgacacttgttgtgggccttccagtacccacagtgagagatgagcaactactcttgctcttccacctggggaacatgcagtgttcactcaagatggtggttcagtttccatgcaactctcagcactggatactaatagggcatggctctctctcagggtgcattacttgtactttttgtggttccgttgggtcagtactcttaccccaacctcctataaacccatatgtaactcaccttacccaggtgaggctcctctagcttggctcttcctgggattttgcttcttcagaacttaaaaatcttcatcattcccttgcaaattccagaacagcataattataaactcagcatttataattcctactaaagtactgaatattttaacacttgctaattttttacccatgaatattatatgtagaatgtaaaaaaaaaaaagaaaaacagaacaaggaaagtcgatctataagaaattgtattaccaatcagcgatcataggtcaatgttttaatttttgttgtttaaattatatatatgtattcttatttttgtcagcttaattcatccagtttggatagagttttcttaaagtcatcagtttccgtatttgttagtttttccttaaaattctgtagattttacttttgttagcctcaagcctatgttgtagagtgcttacaagttcagaattggcatggtttctcattagcttgttttatttttttttccattacagggtgtccctttttattctactaatgttgttttaaattttattttgccagacatcacttttcttacactgatttttttacttagtattggttttgtttttcatgcttttattttaaatctttctatgtggtgttttttttttttaggtgtttgtttctttgtctttatcttatggaagcagcctatttcaaattcaattttataaactgtaattgttaataggtgagtttaattcattaacattttctgtgagtctagtggggtttatgtctgtcaccttattgtttttgtgagatgatcatgctttttctttattgctgtattttctttccctgctttctttttggttggtaaaatttcctattttctttgctttatttgctttgcaataaattgttttgcttatttgtttgatttttgatttcacagctgcctcctctggggagatcctaacctggagctaggtcctcttacaagtagccatgttgggaacatggcagttccgggctcagatcagtggccaaagctcctgatcatccaggtgtgtctatgtgtctcagttgccacccctctcaagtttccactctctaggaactctatccccaagaaagaatgggcagaataatttcccctacatgtgctaagtgagaatgttcaccccagcccctaacatcttctgcagaacactattggtcctctgcctggagcaacccaaaccctggagctactgcctacttcatattcaaagtgcagcaaagtcttaccttctgctgtgttccccattttgtttttctattctgttcctcaactgtggaaatgatcatcttttattgattccagccatgtctctttttatgtatatttttccctcttgctacatgattggagcagaaatgccatcttgacctgaaacctctgtgttctccttctaattctatgattatggcctaaccactgccctgtctctctcaagccagcccttttgattctcaaaagactgttttggaagtcagaaacctgaacattgactgtttcttcttttcattttctctctaattatgttcttatcctcaaagcaatgtagattcctctaactgagaaggggaaagatcacaacagaaaggaaacaataaaaagcaaatgttcaaaaattactattttgagacgttttctctgcatgtccttaatgaggtatatgcttcaaagcccaggttaacccatttatgtgttcatggatttaaacatagactaccctagaagcaactactgacactgaattaacgtggcttattgacttctcctagcaccttctactccctctgctgtgtcagtccagaaaatttaaaaagataaagaggataatgggacattctgtaggccctgctgcctgtgggaagggaggagcagggaggaagaaagtttgccataatgggaaaaggaagagatgacagaagcagatctatcccatggcgactatgaacacaggactccttgttgtctggggttagataaagagatgacacctgagtaacaaaatatgacaccttcaaataggtgaggagagtaaatggctttgaaaaacttcctgacactttaaaatacacacctgctgaattgctactgtgctcacatccaagacctactcactttttattctctttgggctgactcccatgaaatccttttctctcctagaacatgctgaatgctcagatgaacaagattcttcatggactttaatgtctgtgaaatgagtcatacacgatatggtacccatggatgatataggcccatggattactgaataactgtaggcttggctaaaaaaaattctacctcaatatatatttttaaaagtaaggatgctggaactaaagataagaaaaattaaagcaaagcataagcaaaactattctactttttaaaatcatgtttggtgcttgaggtgatgttcaattttttgcatcagctcagctggactacactctccagtcattcaatcaaacactaatctaggtattactatgaaggtacattgaagatgagactaacacctacaaccagctaactgtaagtaaagattaaagattatcttcagtggtatgggtgagcctcacccaatcagctccaaggccttaagagcagaactgatgtttccctgagaaagaaaaaaatttccctgttatctgcagcttcagtttatacccaagaattcccacctgcccttcctgatggacaccttggatttcagagttgcccagccagccctcacaattatgtgggccaacaccctgcaataaatcttctgatatatgcatgtgtgtgtttatgtgtgtgtgtgtgtgtgtgtatcctgctagttctgtttctttgtggaatgctgacagatacaaattttcatactagaagtggttcaagacaaacaaaacattaagagtgagcttctaaattgactccgagttttttggaattggttctttagtttgatttgattcaaaggcactagtgactatttccagtggtaaagagggcattgataatccatgacatgatgtcacaataaagatttgcaaaatatcaccactggacactccttatcaaatacccataaaagtcaagattctggacaactatctatttaatactacaaaacatttcaatcaaactaaggagtataatgggattggctagttgttcttaactgcactggaggaaatataaaaaaggaaataatgcacccaggacttcaaattccaagctcaaatggtgtataagttacttgggatgttctacatctgttgtgaaagaaacctttatctcttatagctgcaaagttgagatttctgaaaactaaacccagagtctcattctgagaatgattaaattataattcaaattgaatttcagccttacaggtgtcttctgttcaaatgagggcattgactgagaagaaacaggattccgaaaattggaatagagacatacgggaagatcttagggaagctggggacactgagctcctaaattctgctgagtgttctttaccagcagaagagagcattctatcactaaggaggttaaccttgctttgcctgcagaagtcataataacctctcctgaaatagttgccttgaaagacactgttgatctccctcaggactcacccccaccattcttctttgtatctagacctgtaactagactcaaatcccagcaggtcccagaagatgagatacaaagtgtgactcaagataaagtacactatacattgagaaaacagcataattttcccaaattacacacacagaaatttgggttatatgtttgtgaatggatgttaaaggtgtttaataatagtggaaggaatgtaaagttaagtcaggctggatttattgatattgatccactaagcagagattctgctagttgatcatcacatccctaggaaaaaaaacagatgaaaatccactaaattctttcttgctttgtataagtggaagagttataggtttactaaacagaagtctaatttgaaacatgaaaacagaatcacattaattgattccaagatttgagccaatttataaacccacagcaccttgaatgaaggagaggcccctatcctcttcaggaaagactctactccactgccaaaaatctgtgcatttctactaaaatagacacttatgctagataggaattggctttccctaaacacagtatttctgcgaaaaccatggactcatagagcggcttattcatcaccatgatattccatataacatgcttctgatcaaggaactcacttcacagtaaatgaagtatgcagcaaatggctcaggctcatgaaattcaccatattccctgtaatcctcaagcagctggcatggatgaacagtaaaatagtccctttaagattcagatagagtcttatctactggctgtattttgcagggctggaccagtgtctcagtcagcatccaatatatggtgccagttctcctatagccaggattcacaggcccagggatcaaggagtaaaatgggagtaacatgaccccctttactaccgctattactactagtggcacactagcaaaatttttcccttctatccccatgactttatgctctgctggtttagaagtcttagttccaaagagtggaactcttctgctaagagacacaacaatgattctattgaagcagaagtcaagacgatcacgtggccactttggactccgcatgcgtctgaatcaacaagctaagaagaatgttgcttgctgacttggctgattaatcttgattaccaaggacactggatttctataatacaaggatagtaagaaagcgtatgtctggaatacagaagaccattcggtgtgtgtcttagtactaccatgccctgagacaagagtcaatagaaaactatggcatccccattaaagcgggactgctaatgacccatacccttcagaaataaagatttgcatcacttcgccaggcaaagaacccgactagctgaggtgcttgctgagggaaaagggaatatggtagtgagaaaatgtacttaaaatattagctatgtgactgaaaccatgtgaccaattgcagaaagtacgactttcatagttttatttcttcctattttgttatgtaaatgtctgtgtgtatgtatatctctggcaattattattgctttttccctttcttaccccttatcatataacataagatgtgtgagtgacagccaactctacatcactatatttaagttacaggaaatcaaggaaaagaatgaacattacccagggactttgtatcttattctagagaaagagttagagtattttcagtttcatgcaggatagttgcattatgttagatggaagcatgtctttgttgttgtcttcaaaatattaaatatgatctaaagagatgtgtatagacaccaagttgacaagggatgggctgtgatggtcagttttatgtgctaacttagctaggttatagtccccagttattcaaacaaacactaacctggctttacctgactaatacacatgggcagagaaaaaagaaaaccaagtacccaaacttttcactttcccttctataaaagcgttagttttccaaaagaagggtaatatacaatactgattagtagtaggcgcttcatacatagtgccttatataatcttcactgtgacctatgaggatgagtaatcagaacaagagggtgaaacctaacttgaagtctttcaagtaataagttcaaggtcaggatttaaactcaagttttccaactccaaaacgcaacctttttccacagagatcatggactcccccactataactgtagattccatcaatatttggccagaaggtgtgattctatgcagactgccctaaccttgggttccagtcttgtcttttatgattccatatcttatttatagcaaataaaattgttttctataccaagtactttttcagtagtgatagatttttattttaatttctttatttattttaaaaataaaactcttgctgcagggagctggcatcatttaaggacaaaaaagaatcgaagccaaagcccagccaccctttcattccttagttgtataattgagcaaatcacttgagtccactgagcctccattttattcctaaattatttttttaaattaaaaataatgaaaaaaatagtaatctttaaattgttcacaagatttttacaagaagtttttgagataccataattgaagctagtgcataaatttaagaattgagtttaatatttatgttttctactgacatactataaactgcttgatggtgagttctgtatctgtctcattttatgcaaaacagtggcacaatgagtatgggttgatttggaggaatagtaggggttgacttggatcaatattaggttataaactatataaaggtggtggttatgtgtggttttcatactgatgtatctccactatccactattagtttggcacacaataaaaatgaatggccattgaaatgacataattacgcagtagattaatttccagggcttttcagtgatggatgctgggaaggtaactttgctattttgtctacaacttcccatttcttcactgtccctctcaagcttccgcatttgtgttcatcattaaatgtgtgtcccttccttactgcccatcttttccttcctcctcctcctcagagtgtgccatcagaagttaccatagtcacaagactattggttataaaagtttgaaatccctgttgactctgctctccttcccatccccagagaattcagatattaagatctattcattttctatcatctaggagatgtgaagatgacttgctgagaaagcgatacatatttcacattactgccatgtcaattaagtatccataacaaaatcccattacatacttgcaaaatgagtggatgagagcctttgattttttaagtctcagttctttgcctactaaattaatttttactagaaaatattcaaaaaggtctaaaacagtaaggttaacttgtagtccggcacttttctgataacattatcgtaagaggtatacaaggacttaggcactttatcactagtaattttcagtcacctctattcatgtctgctcttttccagtgccttccaccttacagcttggtctcttgggcagcaagggattgagatagagctattcagtgcatggtatccatgccatgttccccagaactcttttgctgccaacccgtctactttggccaagatgggaaggaaggggaggggagaggagagagaaatatttaacttttatgaataatgaataagttcattcagtatttagtggtagaagaagagatttccataaaactctaaaatgctaagacatgaattactcatcctaatattcaagcattcaatatgcttctatgttaaactaatcattttgaaaaggaggaagcaggaaacaatgagactttgtatcaaattaatttgggaatggtggttcttttcctttcctattttcttaatataaataccccatgactcctggaatagttggataagatccccctccccatcaataattgcctaatgaggtgtggagcgctcttctctctctctctctctctgccaaggactcttggataacaacgtcgggtagagaatcactggcccggatgacttggttcctgggaaagaatccaggctgttgaggcactcgtggaaacaaaaagaatgaaacatgagcctaagaaatttaggtttcactctggagaaaaatctgagaatggttctaggagcttttcaccattgagtctctaggtttgccaaacagaagctatggggtcctcttctcttgtactaacaagctagaccccaagcagtgaaactgctgctatagaacaaaggagatctccaaacccattctgttctaaatccataatcctgatggctgaaggcaccgaagctagaagcagtgtcttgtggcttaaacttcaggcgcttgtccctggacccaggacgcttccagcaacgctgccggcttgccgaggctcatggcaatcagatcctctttctgaatctgagttttctcacctataaaaagtaagtagtaccagatacataaattatagaccgttactatatgaagcctctaatattggccaaagaaacgcctgaggaattattttttcccagcatattttctttatctgggagtggagtgggttggaatggaggctaggagtaccaggatattcctctgcctgactccagggggcagcagctacttgggtaaagggaggtcaatgacccatccaagggttgggtgaccttagttcttaaaccctgaggtaaagagacagatccaacaaaatggactttttaaaagaaacataaaatcctcagaagtcatgccccacttctaaagaaactatggctcccgggagatcctcagaacatgaaaatcattggtgaaaggatagtatttctcctgaagggttttccttagattttcctggataggtttttggtgagagcagatttatttttaacaaatgcacacacatggcatcctctttcttgatgacaaggattttttattttttccaaaatgtgcctggcaggccctggagccagagaaacaagactgggaagcctgatgttacacaatgcattgcaagtgatagccgaaactggtctggtttccagacacctcctgattcaacagggatgtgttgcattagcactcagagtttctaacatagtagcaaatctacatctttactctatttttccatctcattagtaggaaggaaggaaggtaacttaatagaggaggacgcagagaattctaacagaattgccagctcttttttttttttttttttttttttctgtgtggctttaagcctggtgcttgcagcagaagaaacccttgaaattcttgaagctaggaagctaaggtttctgaaggaatgaatttgcactgcacacataatctataatttattagcctgcttcaatggtcattattgagatttgattgtaatgcttagtggcgttaacatcccttccacatctccctaacaacatttatggtcagtaataatattggttcagtgcttgagctgtgctctgaagaatgaatctgctagagctcatcttgcctcattacttctaacaaggctcctgtagtcatgtcaaactccggtgacatgccagacagaacgacatcttttaaatattatctctgacatacttcatttgaaatgctagcctttcaattagtgctatgcaccaggaagtgacagattctggaggaagcattgcttctctagatgatcataatgagagtagggtgtcacaacagtgtggtggaaccagagaagattcccatgaacaagtccatgaaagtctctttgaacttgtttccccacccccggtggacattgttggtgctctatttggatgtcctcatatccctcttattgggactgtgcacccgttcccccagtttccacttgctttgctactaatggctgccttctgctcccatggacactgcacctgcacagagcctgactctcacaggcacccacagctagtgactgactggtgcagaagtacaaaagcttggctcctctgctttaaggctgggcaaactctggggtgtaatttatgctccagagcctccagcagaagcaagctgagtttggggattcacttgaaatcacactttcgcttggcttcctccccctctttttcctgcttcccacaatcccttattggcctttccaggggatccttccttaataaatcatttgccaggaaggtttggctcagggtccattttggggagaagatgatatcagatgcatcaggcaggatcttgaatctccagctgtgtgcaagccttgtaaccattctgcttctgaatttgctcccctgcagtgggaacatctcctagcagcacgaactgtatatactcccaaaatacccatctccctccttcacctccactcaaggtatgagctgttccagcagcttgggccttttatgcaagacagcctaaagggaatcaacactttttttttttttttttaagaaaatgggtctggctctgtcacccaggctggagtgcagtgagctcacaattcttcaaactcctaagctcaagcctctgcctcctgtgtagctgggactacaggcatgcaccaccaagctttcaacacatttttaattgcttactattgtcattagtatttgtatttccatcgtatcttctcaccaaccacttcacatgtttattagtagatccactttacagttaaagaaactgaagttcagaaagcttatgaaaactgaacaaatcccacacccaaaagatgtgtggcttttaacccaggctttcaactccaaatccactgagtttttcacatattgtactacagtggccccactggcagccaggccatgatgttcccaattaaatataagtaatgtttagatcaggtcacatcatgatcatgtttgcaatatgacagagacaagttactccacaaccacaatgactagacaccctcttttgactaatgtgaataactagtgggttttttgtttttgtttttttgccaatgacaaccttagcttcactttaatttttctgccccctagatgaaatttgctctaatttcttgacagcatctaatctagagcaagcccctgctttattaatttctccttaaattcatccaaagccctaactccgtcagaagccttccttcaatttcccttatgagattctccaaggcttcctctgggttctattctccctttgctgcagcaaactaataaacctaactttgttgacttcaggtgtgaccctgatggtttcatcatccaggtttcatcaacccctcaagttgttttccaaaataattttgcataagatcaactatgctgttgactagcaccatgttttatgcaatgtcagcccctattcattgtaaaatgtaaatgtactgataaaacctttaaaaaaacagactgccagttaaactacgccaaaatacctttatgttagtcctgagcaatgcacaaatcagtcacatcggcttatcagtttatttatttttacatatttcagaggatgtgactgtttctcctgagttcaattgtactcgttggcataggatagataatgtttttgcttgtgccttgataacaaaacctaactgctttacctgtgagtagcttcctttcttattaacataaagcacttggtgtagctttgcaagataatgtggaattgcattcattcctccaacatcaaacatatgcttcattaatatcaaattaatatcccaaagccttatccttctgcatttctgcctttgagatattttaaggctaaattattgatggcaattaaacagaacccagatagtaacaacattgcacataaaacaaatgaagtggtaaccaagtttttataagcacaggtaatgctgctaggttctgactttcacctgatgcaaagggatagtaaagggcaacatcccatcctgattttgccaatagtaaattgtggaaaaacattcaccttagtatcaatgaaatatgtgaatgtggctgcaattagttatttgaaatagaatttttcttcatattactttacaagtataaaatagaataaacttagtaaaggagcagaaacaaataaaaatggaattaacctttctcccagctaaaggaaacatgaaaacacattgtttttcttcttttggaaaaagaaaaaaaatgcatttacatttagagagacaaaatatttctaggacctacatctaaatagtaatgttagtaatactctctactgcttttcaatgcatatttaattatgttacctgaaaaaatatatactccaaataaatgatctaattccggtattccatgtacatggataggcgaggaagggaaatagtccatgtacatagataggtgaggaagggagacagtaggtttggatggaatagagcttcctttgattccatcccatgccaggagtcaactgcttataagacgttgtccaccctcatcccagccctagtgactccttcattgtacccaatactgggtgcctagtaattacttctaaatgatgaaatcttagcatatgtgggagtaggaattggtgccccacccaaaacctctttaatgggccattttacccatccctcagctaccatattgattgttactggctcagagttgtcccctactttaattgaccttggacaacagaagtcacttcacttgtgggcagatagggagggaggtaagtcggtaagcagggtatttatccactccctgggaatggtctgcagctcatgatttcagcccctgacattaggtacaaattggctatccttgacctcaaggtgggaattactcggtggtacaattcatactccagaaatctccctgagatcaggcgtgaagttaggctaacctacttacttaacccattttcctgcctcaccctactgaattcacatcccttgcccatgtttccacttaagagaaccccactcttaccctcatctcaataaatcacctgcatgagaatcctcacctccagctccaggatcaaagaaacttaaaccaaggaagctctatcccaagggtctttgcatttttatattgaacctgttcctttctctgtctctccatatgcagtcagctctactcgtagaatctagatcagaaagacaaacctggctttgccttcgctaagttactttttcatctgctaccactcctgtctcatgaagggaagagaaagaaaacttcaagctgcatcctctaccaaccaccccaaagaaaagaaataaagagatagagacttctcagccattgcccagagataatttcagagcttacagagaaaaccttaaggaaaatcgtttttgaagccctggacatttgtccatccctttagtaggggtcattctcatgaatgtggttttaaaaggttttttttggattccatcatctctccatctattatcgtcctttgtcctgggccagctgtgctgtgattggcagatttacccgtgcaaaattcagttccctttacaactctttcccttttcaccatgcttattttttctaaattccttctttttccacgctcatccatgagatggatggttgctttttatctgggcagttcttctgaaaacaaagccttcaaaggatgtgaatcaaaatgtctctatgttggagaaaaaataaaaaagaaatatccttttgaatcaaagacctaaaaatttcttggtaatattttttaaatttatgctaatttcttccctcccccatactttatttccatcacaaaaatattttttttttgctgatgatttaattatcattgtatcacagtcccttaatagatagatgttctccttaaattactgtttaattccttaaggttttactctttaaattcttccattctgttcctttcacatagtttatgtaagcatgtttatctttttcttatattcagttcctgatttatagttctcaaactcttttagaaaacttatataaaatataaatataaaaaataaaagattagaaaaaattatctaaaacccactgttttatggagtttcctttgatcccactagtctgtcttctttttgattttataaaggacagagattttggtaagctcttaaagtcctaaataaacagaagggtgatcaattagtaagtcaaaatgaaatgattgtccctgaacccagatttgtttgcactgggaatcatagcctctttccagtcttcctgccgtgtttctatgccatttgactcctcttgctttctcgcatattcccaatgtgtcaaaagggcactaggtgagtcaaacaggagtcaatcaagaatcaaacattttctgtaaaaggccacacagtaagaattttaggttttgctagtcgtgtggtctctgtcatgctgctcaatcctgtgttggggtataaaagcagctatagacaatatgtaaacaaatggggctgtttgtattccaataaaactttatttacaaaagtaggccataggttggatttagacaatgggccatagtttgctgactcttgagttaaagataagaggactctgatatctaaagatacatatatttgggctgctatagttatgaatagagatcttagaggtacaaagagacagaaatgcaaaagaaaggtctcaaaatttatccattaatttaatattattgtttaagggaattctctaaatggaagtaattttgtctttgtatattttcttttctgtggtctgttaatatttgaggcaagatttctgttttaaagaaaacatttggtacattcatactaaggcaagaatggctaattaatttattatctttcccaaagtcatttgcaatttaacagaggctaagcctgctttctataatctaggtcagtgaatggggagggaactaatatttgtttggcacttactaggttccagttcctgaatgtcaatcatgtctttttttttttcttttttttttttgagacggagtcttgctctgtcatgcatgctggagtgcagtggcaccatctcggctcactgcaacctctgcgtctcggattccagcaattctcctgcctcagccccaccgagtagctgggacttacaggcgtgcgccaccacacctgtctaatttttttgtatttttagtagagatgaggcttcaccatgttagccaggctggtctcgaactcatgacctcaggcaatctgcccgcctcggcctcccaaattgctgggattacaggcgtgagccactgcacccagcccatgtcatctttttattcctctcagtaaccctgtgagatacaaaatactatgatgtcaacttcaaagatatggaaactgagacttagagtaattgagtaacttggtcagaaacaactagctgaaaagttgcagaactgaagctcaatcctaatactctctttttccaaaatctgttccatacccttcaatggtcctaccttattttgcagtggatccaaaagaccctgaggtcccagtctccttggagaatctgctgcaagctacaggttaaaaaaaaaaaatcctatgagttttgtacacaatttcaggagcttcactgaagtgtgcatgaaatatcaaaggctacacaaatccctccaggtcccatttccagagatatatttctcctgagcatttctttagaagcttggaatcacatcacatgccagctgcctatggacccttagactcagcacttcattccaggtggccttgagatgccagatcagccctgcagttatgttcaatggagaaaaggagaatgatagagggcaaatcacttttaaaaattagcttttttgaatgtttttgcatttattgtgcatttcccatgtgccaggcagtggtttcaagttttagatgcatgcccaggaggtagatatatgattatcccagtttatggaggagggtatttttttagtctgttctcatgctgcaataaagaaatgcctgagactggcgaaactgggtaatttataaagaaaagaggttaaattgactcacagttctgcatggctggagaggcgtcaggaaacttacaatcatggtggaagatgaagcgaaagcaggcaccttcctcacaaggcgaaaggagagagagtgagtgcaagcagaggaaatgccagatgcttataaaaccatcagatctcctgagaactcactcaccatcacgagaacagcatgggggaaaccgtccccatgatccaatcatttcccactgggtccttcctatgacacatggggattatggggattacaattcaagatgagatttgggtggggacacagtcaaaccatatcagatattatgatacattacagaggcaagataacttgccttaaatcacacccctggcaaagaaaagacccaaaccagggaagtttattctctagggcatcagttcttatccacctttactgccagcaagccttccatagacctgtatgtgaagacaggtctctgtgtcctacatagaaacaactggaaacctctgtgttgaatatttataccttaaagctcctggtatttgtgctatatacattgtcgtcattaaaaatgtgaaggtaaatatttataaacagctgttaaggaaactagacttctggggagaaatattaaactcaaattgctgcttagaggttttcttttaaaaatatgaatatgcagactgactctaaatataaacctttttcctattgtaattctacctttcatagcccagctaaaaatctgctagaattcagcaataggtccccaggaaaatgactgctttgaaaatgtttggctgaaatcagatactacttctcacctactacaatggctaaagcaaacaagactagcaataccaatactgtaattggaggagatgtggagcagctggaactctcaaatactgctgtgatggaatgataaatggtgcaaaccttttgctaaattgtttggcagttcccaataatgttaaattcgttcacctaccctatgacccatcaatttcactcccaggtatttatccaagagaactgaaaagatacatccatccagataaatctaaaagaatattcattgcaactttactcataagagccacaaaccaatatacagcccaaatgtctatcaacagatgaatgcataaacaaatggcggtataaccatatcatggaatgttactcaccaataaaatgaaacaaactacatatagatgctctcgatatatgttcctacatgggtgatcttcaaaaacatcattctaagcaaacaaagccagaaaatgactacatactgtgtagtttcattaatatgacattagaaaatgcaaactaatctgtaatgacagaaggcagatccatcagaggtgtcctttgatgagaggaagattgaaacaaagggcacgagggaatctgctgcagtgatgaacaagttctttttttttttttttttagagacagagtcttattctgtcacccaggctggagtgcagtggtgcaatcacggctcacggctcactgcaacctccgtctcccatgttcaaccgattctcctgcttcagcttcccaagtagctgggacttacaggcatgtgccaccataccgagctaatttttgtatttttttttagtagagatggggtttcactatatattggtcaggctggtcttgaactcctgacctcaggtgatccgcctgcctcgtcctcccaaagtgctgggattacaggcgtgagccaccatgcccggcctaagttctgtttcttgatgggtggtgggttccatgggtgtacatacttgtcaaaatccatagatcagtatacttaaaaatctgcattttattgtatgtaaattatacttaaaaagtagcagtactggaagaaacacaaaaacagtttttcgatgaatgcctatcttcatccttgggaggctcagctgtgggcctggcttcctatgtcacagccttccctgcatgtttacggaccatggcaggttcttctgctggccccctctggtactcagaggggttcaggcaggaaacagatgcttttgaatacttactgccccacttttcgtgctctttgaaggacgcaagaaaaaggagtcaatctttacatgcttcccaattacaaaaagtagctaggatggcaacaatctgtcttgacttcccctgtgtttacatcctccaacccagacctgagaaatgactgtgaaattctgaccaagactcactgttttggcagcttccttttcctttatttgctccccatccaaaattctcctccctcttagggatgtctaatttatacaatttgtctagcaggtatggtactggtttaggctacatttgggaattccagctggggctgggaggaagtgaaagaggaggacggttcccagaaggcgcataacaggcattttcagtgggggctttccttctgccactccgataagcccctcgagttcctgcctcctccctaggaaagggtaagcaagacagaagaaaaggtcaacaaccacaacctagacagtgaaaatgtctctgccaatttcgctggggccctccagggctagtaaccctccaacccacttaatgaatttagagacacattagattcatttacataacaatattttaaagaccacacgattgctttggaaaattgtcttatttttttttccttcctcaaactgaactgcagagttacaaataccctcccagagagcctcagaggaggcaaacttggcagaggagagaacggagaaaaatccatcccttgcaaatgccaagcggaagaacaatcccgttaggcggccagttgatgcttaactgcgggactgggggctcgggcagggatcttaaacatcatttcgcgtagggaaacaggcactctcctctcccggaagacaaggctgcgcgtaggtttatctcggcctcctggaggacctgtagtttttgggagagcagctgcgaggggacagaatgcttcgctgtggtggttccgccgcgggctccgctgccaggaggccggcgtgcgcgcagctctgcggcggggcaggctgccagggcccggggagcagcggcagtcttccttggaggagcacctgttcttcctctccctgcgccggaaacgtgccaccttcccccaccccatgctgctttcccctgcgtggctccattttgtctttcctgatggcagatacccccgcggccttcctctcgaacacttgcggggcgctgggggaggggacggccacgtcaggcgcatcccttttcccaacaccccaaggtagcagcagcagcaggtgctgtgacattatgacaaacactcaggtcccccgtgactggatgcgtcacacactatgtctaacagtcgctgacatctcatcaatcacggccttgattatgctgctggggtccctgggctcaactttgggctctgaacagaatttactgcaaactgaacatccttatttccaacgtaggcaagcccgtcttgtttataatggcataatccagctggaagatcacactggcacactcaaattggcccatcttttctcttgtcaatattgcaattaggtgcacatccggcatcagaaattgctgggacctttttctctcctgcactctcccaccgtttattacaactgaaggacacattttgttgtccctgagagtgatgtatttgaggaaaggctatgactcagtgtatgacaattaaagaggaaaggacattggtaatgattaactagcttgtctacatgatgtgaggctgtttgtcaactaacattgattgagccagtagtctgtgaccagccatgtgtgagactctactgggaaacacaggtaggaaaaaaatgattattgcccaggagagcctcaaaatctagttgataggataattgtgcaaatgtttacgtaggaaaatattgaccactcttctttgcctagtaataaagacagccgagagcctgaccacagtgcatggatcttctgctttcctagattggttcactccctttccccagaatattcccctgtgttttcttcctttagaaataggctgatggcattgttctaacttgaggccccacccctcatgtatttctctaaatcaaggtcagcaagctttttatatacaagatcaaatagtaaatagttaaaacttcgtggacccagaggcaaaatggagcaactgatattgctaaaagattaataacctttttttacactttacatttaagaatgaagaaaacactctttagtttatacaccatacagaaaaaagtagtgggctggatttggcccaaggtgcacaatttgctgtttccttatctaaatcctatttgtcttttaagatccagctcaaaccccaggtgctatgtgaaatatatttgacactccccatccaaaattctccttgctcttagggatgtctaatttatacaatttgtctagcaggtaatctcatatatttattcaccaggtagtatggtaggagaaggaagagtctaaattttcaaatcaaacaataattttcaaattctgattttgcaacttacagctgagtggcattctgaaaactacttaaattgtttgattcttgattttcttatctgttcagttggtaaaatgtcatattaataatttacacagaatattattaaaagaaaatacatcaaaaatgtttatgtgttaggtgttagtttttaaaatttccttacctagaacatctaaaattattgacataaaacatatacctcctttacagtgcaaagatttaatttatctaatccacagggctacgtgcatgaaataaaatgatatgtttgaaatgttgtaaaaccttagtaaatattatatttatctcttcacaaattatttctatatcctcatcaggaaaatgtcttgtgttagatattaaattacatttctgataaggacaaatatacctcatacactttaagtcctccacaatgcttaattaagacctggtatttggcaggtggtgagaattatttgctattaatttaaacgatatccaaaatgcttttatactaaaacttttcaaaagaatgttatctgtttatttctatctgattgccctactcctcaatctaattcaatctgtcttctctccccagtactcaatcaacttccacgtctctaaatccagtgaacatacgtcagggctcatcttacttaacttttcacttttcatcagcactggattcaaacattcccttttttttgacagctgatccctttgaatttcatgactgatagatatgcttcttcctaattctcttctgtctccattcctatctcatttgcatgatcaccctcatttggaaataattcaccatcagcatttctaaagacacagtccttgctgttgtctctccatgctttccatccatgcctgtggtttcagataacacctacacacagattcatcactaaatttaatctctagccaagaattcttctgtaaggtctagctcactcatgtcactcaaagacccctgaaagtcaacgtgagcaagactaaatccaggatcatggtaaccactcatctctatcacccactagtttttcttcggagttttctatctcaaaaaaaggtgtcccattcttcccttcaaacaggccagaaacctgggaattattctgaacacctccctcttcctcatcccaataggtaatcaccaaactctgcagagttagactcttaaataactcttgaattccttccattcctttttttttcatggtcaatgccaccaccacagatctgatgcctacaaactgtgctagcttaccttcacttcctctgaacctccctgatctgtcctctactccacagactgatgttctcacaatgcaaaaatccaaattggatcacatgaccttcacacttatgaactcctacttacgctttgtatcaatttgtgtcaatcctgagggacagctccccttaactccagcttttacagcctaatctcaaactggtccatccttcttctgagttgttgtttcagcatgtaattaatcactcagcagagtgattatttggtagtttatctcttctgctaggatctttgagagcatctaattgtgcctgagtctactgatgattgaaactcaaacgtggcatggtagttggcaaatacccactcaatcaacatttgtgccatgagtaaatggatggacacattggaaaggatggctggaagaatttgaccaccaaaactctctggtttatatgaagagtcaaccattaaccagttttttaagttggagtattaatgtttttctttgaacagtggattattttgggacttctaaccttcattcatcaattcacacagtgtctaaatgtttttttgcagatcatttggcctatcatgttatacagtcagtccctttggatgtaagatgcagagacccatccaggtgaacccaagtaatcaaaattgattataaaaataacatggaaataaagagcataaagcttttaggagtttctatcaaaccagtctacaaaataactgggcctcatgggcaccaaaagttaagggctatttggcattagattacctcatgctctttcatttatgtgagacaggtgctatctgagacccgatgctctgaaggtgacttctactctagttaccagttgattgttccagctatgtcccttggctgacatgcttatttatgggacagaatctgatcatcccaggtggcaaacggttggcctgttcagatagccatcactcagccaaaggactgcggccattgaatcaagtctgtataagccaaagggagtttggcttatacagacttgtactctctgcttccgtagagacaccttgggactacttatcccagaagtagtccttgcttgtagggcttcactgagatctcttcttggaagccagaacatctaactccaacatgcttttgatgttgaatgctagattcacacttgtaccctcccccggagaactgcccttagctattagaagtgaatttctttggaatggttgacttaacagcacaaggcccttaattccacatttgaaaaactagtatctcacaaaagcaagaagacaagtcacagatggggagaaaaaatttgtaaatgacataactggtaaaggaccattatcccaaatatacaacaaactcttaaaattcaataattaaaaaaatgaacaacttaatgaaaaaaaaatgggcaaaagatctgaacatgtatctcaccaaagaatgtctacagagggcaaataagaatataaaatgttcaacatcatgtgtcagtacagattgtaaactaaaacaacaatgagatataccactacatacctattagaacagctaaaatccaaaatgctaacatcatatgctggtgaggacgtagagcaacaggaactctcatttcttgctgatgggaatgcaaaatggcacagccattttggaagtcaatttggcagtttcttaacaaaactaaacatagccttaccatatgatctagcaatcacgctccatggtatttatccaaatgaactgaaaacttacatgcacacaaaaacctgcaaatagctgtttataataggtttattcataattgccaaaacttgcaaacaaccaaaatgtccttcagtaggtgaataggtaaataaactatggtacatccacacatggagtattattcagtgctaagaagaaacgagctaccaagccatgaaaagatatggaggaaacttaaatgcatattactaactgaaaaagccaatctgaaaaggctacacactatttttctaaccatatgacattcctggaaaggacaacaccataaaaacaatgaaaagatcagtggttgccaggggttggggaaagagagaaataaatacagctcaaacgacttttagagcagagaaaatattctgactttataatggtagatacatgccagtgtgaaccctaatgtaaactataaactttagatgacaatgatgtgttaatgtagagtcatcgattgtaacaaaagtaccactgtggtgtaggatgttgacagttggggaggttgtgcatgtgtgtacaggggtgtatataggaactttctgtactttttgttcaattttgctgggaatctaaaacttctcctaaaaaataaaatctattaaataaaaactctaaggccattcattctggtgggaacaggccaaggttagacttcacaggaaccaacatcttttgtttagctttttcacctgccttatcctagctcccccactcatttccctgaggtcattctctcaataaatcactcgagaaaaaacacccatctcaggctctacttctaaggaatcaacctcagacagagctgcaggcctggtgtgcattattgctgacctgtttaaagcttttcttctacttgaagtagtggaccatggcagagtgattttgttggaagaagagagagttaacagacatcaggaatatagaaaaaatagaaaaaaaaaatgggcctggagagagttgaaaagaaatctcatccgtgttaccacctattttgaagatttgtctgggtgccagcttctaattctttgggagggaaatgaaatactctcagttcctttcactcattgtgttagtttcctgtggctgctctaacaaattagcagaaactaggtggcttacagaatagatatttattgtctcatagttctggaggccagaagtccaaaatcatagcttggcaaatccacactctctctggaggctctacgagagaatccttccttgtctcttccagcttcttgtggctttggaaatccttggtttgtggccacatcactccaatcttcacctctgttttcatgtgaccttctcttctgtgtctgtcttctcctccatgtgtctcatacaaggacctttctcactgaatttaagcttcactcagataatcaggatgatctcatttttcaagatccttaattacatctggaagacccttattccaaataaggtcacattcatagtttccgggattagaagggagacatatcttttggaggatcatcattcagcccaccacgctcaccaaattctttttgccccctattggttttttgttttgttttgttttgttttgttttgagatggagtctcgctctgtcacctaggctggagtgcagtggcataatcttggctcactgcaacctccgcctcctgggttcaagcgattctcctgcctcagcctccccagtagctgggattacaggcacccaacaccatgcccggctaatttttgtatttttagtagagacagggtttctccattttggccaggctggtctcgaattcctgacctcaggtgatccacccacctcggcctcccaaagtgctgcgattacaaggcctaggtccagccttgccccagaattctatatgataatatttcttatgcttacatattgatgtatggtcttcacagttctttcaactaaatagtctattaattaccatagtaaataaacataagagtactcactgtctaatacctttttcctatgcccagacataacctgcgagatgttattattcctattgcacagctgaggaaactgggtcttgggtgagctttaatttttcacccttggtatttcaaacttggtatattcactgtgcttctctctccagtgatagttagaagtagaaggggctccagcaggaagaaacttatcatgatctttgggtaaccattttaagtataaggcaaatagtaatattcataggagcagaacagattaagaagagttcaggtcggtatgcaggggccctcatttgtcttgtaaagtagtatggtggaatgagaaggagctttgagtcttgcagtgataactgggatcctcattgttcttttactggcttccagaacttaagcaagttgcaaatgttttctaaggctgatttctaacccattaaattaggatgtccccactttgctcacatggctgttgaaagagtaattgcattaagagtaaaatcacgctcacctggctcaatacatattaatgtccacataactcattatgtacctgcagaccacaagcaggaaggcacctaggatagctttatatctctccacttattaattcttttcaaagatctctcacctactcctccaggctggctctctcctctatcacacagctgggagagaaaagtcagatatcatgagtattataaatgttcccatctcatctcaattgatgcttcctaatttatataagttcttttcttcaattgcccccaaagcacccatttttaaaagattatgagccaatatgaattaaagaatacagtcaattttttgacacccccgccccactatcccaagcaaatggacaaaatttaatgtgtaaacctcttagacaatgagataacaagctcacgtatttggagaaaaaggaaattattcagcaaatcagtggctattacggaggctgtcaagggttctttagccagggagctcagaccagcaacactagcatcacctggaggcttggaaggcacacacatccatagcgcaccccatacctgctgaatcagagtctttgtagcagggcccgggagtgtgcccttggcaagatctccaagtaatgatgcacactaaagttttagcagcactctactgcagcaatggttctcaaattttagtgtccatcagaatcacctggaggattgttagaacagattgctgggcttcacctccagagtttgtggtgcatggatttggaggagggccagaaaagtctgcatttctcacagccttccaggtgatgatgatgccattcaagatccataattggaaatagttgtacgtacccatccagagataaatgtattggtttatttttttctttgcagatgaatccttaaatagggattttttttaaattaaagatttatattacttttacacctgacccattacacataggttcttttacactatcttgataactgttaagtcagcgcctccattctctacagacagaaagtcgcctgtcacttctgtctccctcaagatatttctcagaccatcctcctgacactggtaattgatccaagctgatcctcactatctcaaatctattgtattcatctctgttttctccagggtaccacaaaacacaccttccctcaaccacaccttccctaagccacattttggttgcatctctccctgtttgtagagtattcaaggactctttaattccttccgtattacacataaactctctctttctcctgggttttaagtcccctgtgatctaatttcttttttacagccattccgctaactcagtagctcattctctgctctgctcagattggtccccttcctgtaccacacagctgaacattcgtttttcaccgtgactactgttttcactcagaatcctctcctttcccatccaaaaccaacatattcttcaaggcctaaataaagtgctatctccaacccaggcttccacacccgccaccacctctccctgtccactgcccaggttgctattcagtgaagcaactcttcaagctgagctatcagatacttaacactacactctaggccattactcccaatcaaaataggcacagaaatgagcttagaaaataaatggaaactttaatatttcctcagtattctacctccttatgaccttggttattcaacgtatttctgaatccactctctcttcattgttattcaccaaattagaaactcacttagaagactaattgacttaaaatatttgtgtacccctccaaaatatcacataattctgagtataaggcctgaagttacctgtttgtattctaattgaaaagaaggtatggtaatagatgtgcagtgatgcttgtacttgatctggctgtcttcactccatagagagccaggttcatctgactttctcattcaccacatcgaagaataacactagaaatatttgcttagtaaattccttaggattccacagaacaaaatggagcttatcttcatctcttcagtagggaggggaatacaaggacatgaaatttattatcagctcaaaagcagcagataccaaataaggctgaaaatcaagcattgtgtctaagataagagtaatagtaaaagaaatacagtttacaaccgtggcaccatgtaaatactgtgccttatcttggtttaaattaacatttacaggagctttttttttttaacctaaaatataatcttgacctcaactctgttttttgttgttttttttttccttttcatgtcttgacatacacaatactaagggggatatgggggaggcacagaggctatgattaaatctactcctagctaccattatcttctcacttttcatgagctctaatttaaacatcttatttatagtgcaatgttcttaagagttttctgggtgtatttaaatggggatagttaattggaactgttctggcagaagccagcttcaatctcatcctcctaggtggcagctcttctctgctcctgaaaaataatgtaattttctcttctttcatctaattttcatgtttattgttactgctctgaatattgtgacctaaggtatatgagattaataatgttttttgttttaatattattattaatattttcagtcttcacatcatgaatttggtattttcctacagtacttctcactgttcttgacataaaaataagtaaagcctaatgcagggaaaaaacttaaaaatagtgtgaattggaaattgaaaagaaaaagtgaaaactacatgctatattttaaatatatgttaaatgaccttagaaaataagcaaaaactatatccaacttcacgaaaagttgctctactcacctactcttgttcccagataataaacaccttagataagaagtacaattgtattatttatggctaatttgatgcccagtatgtagggccacatgcaaagttaggttaacttacacgtcagcttcttttgttctccccaaataaactatcttagggtgagttctcctgaaacagatcctgagacaagactaagttgtttatgaggaatgtgctcaaggagagactgataagagaaggaaaagcaggacgggggagtgggggggggaaggggcggagaccaggcagagggtaatttcaggtgaggcatcaatctctgcctgatctgcagggagctccagagtacaataacacctagactttatccctccttaagacaaaggatctaggctttcatactcaccagtcattggctgctgataactcctggtgaacattacctcccaggcacttctgcctctcagtatgtctgtgcaaagaaggtcacagctgcctggtattggcattggtcagcttgtccatcaactcagctacaagagtcctttgttgctcttcctaaggtttgttttttagggaagagcctccagccatactctgtccagcccatcagaacttctgcacaggaagtagtgtgcaaggaggtcatagtgttctaaaatgctatttgctcatactcccaactgcagggacactctatcttttctttgtcaggggtacttctttcttcaaccatgtattgacttagttactgctacatagtaaaccaccccaaaatgtaattgtcttaaaacaaccaccatttatttagcacaggagtctgtgggttggccagttgggctgggttcagctgggtggttcttctggtcttggctgggctcccccatgtttctgaggtcagctgcaggtcaaataagaaattttctgattctgggccaagcataatcaggtggcttacccctgtaatctcagcactttgggaggctgaggtgggcagatcatctgaggtcgggagtttgagaccagcctgaccaatatggagaaaccgcgtctctactaaaaatacaaaattagccaggcgtggtacctgtaatcccagctactcaggaaggctgaggtaggagaattgcttgaacccaggaggcagaggttgtggtgagccaagatcacaccattgcactccagcctgggcaacaaaagtgaaactctgtcttaaaaaaaaaaaaagaaagaaattttctgattctgaatgaactttaccccatccctagagcctcaggtaagacaagtagaatgactcatgtctgttccacatggaatgtgttctcttatccttgaacagaatatcccaagcttactcatgtgacagtaacagggacaccaatataatacatagtgatgtgtaaggtttcttaaggtctaggcttactactagctcactgtcacttctgccacattcaattggtaaagcaagtcacacagtcaggccagattcaagaggtggaaactagatacagagtcataatgcaaagggcatggatacaaatgcaagcaatagagctttttttccagcataacacagcctttcaatgcacaaccctactactcccagaaatgtcaaattaattcccggacgaacctaaccttcacaatggagaacgaagaggagatttcctttgtcttgttttctgccatccaaagaagcttccagtgcaaggtcttctcttttctacaggggtatggaatagagatgggcagttaagttcatttcctttttttccgtagcagcaaggacaagacagaaattactctgagtcaaatatccctctagatgcattcaacaatgcttattttctattcactttgtgtgtgtgtatgtgtgtgtgtgtgttgtgtgtgtgtaaggggtagtgtcatgcatcttgtttatcttcgtgtgatatctaatgattaaaaatcacaaaaataagtaaagaacatagccgatgagtatgtttagctcttctgccaggagataattcctagtagctctaatttgtgaattggataaagataaatgttttttatgcactttcatatgcaggaggccattttatataatttgtaaccaaaggctgtccatagagtgtgaagttaaggaacgatctatataagcttcaaatgttgttcccagggaatttcttcacaatatataaaagacatccactatttaatcagttatgagatatacatcttttatattttaacatctctgaaattgggatgcatcttaaaatgaatgagctcttaaaattattaattaccattttcttaatggcctataaaatagtggtgaatcttacaaacaatattgtcttagattcaaagatatatgataaccagaaataatagctgttttatcatgtaaagcactggtctgcaaaacccacataaagtcattaaaaaagtaacaggcaagccttttgacacaagtgctccataatttaacaagctttacttcttaaatgatgagtgaattaaattccaagttcagtctagttgagtgtatacatgagatacgatgaccaagttaataagatcagaggaattcttcagaatcatccttgaaatctctggagataaaggaaaaaaacaaacattctggcttccttaattatcagcttaaattttaagttagctgtccagtgtaaaggagtgttactgggttactattagaaagcagcctcagatgcataaagtatggcaattctcctggctgataatttagaaaaagagaattgcggaggagtcaattcagatgtggcatttccaacctcaccctctaagttcacacctcatatactctgttagaaaatatttcttctcagctggtgcggtggctcatgcctgtaatcccagcactttgggaggccaaggtgggtggatcacgaggtcaggagttcaagaccagcctggccaagatggtgaggccctgtctctactaaaaatataaaaattagccgggtgtggtggcacgcacctgtaatcccagctactcgggaggctgaggcagagaattgcttaaatctgggaggcagagtttgcagtgagctggcagagatcgcgccactgcactccaacctgggcaacagagcaagactccgtctcaaaaaaaaaaaagagagagagaaaagaaagaaaatattttttctcattttcacaactgattactagtctacaacccatccaaatgagttcactttacctttacatatacatatacattttaatctacgtatatgttatagtcttcagggtatttttaaatgtttatttttctgagttttccacatcttgccaattttccctagtacatatgtattaccttgatcatcagaaatatttttaggtaaaggaaaaatctgcagagaagcaaaacacaagtgaactaaatacaaaaaaaacaaacaaacaaaaatcctcagttgttttacttactgtacgccaggccactgaccagttggaatcctcatatttttatgtggtcagcactgttatcatctgttatcatcttcattttacagatgagaataacataacacaggatgagagcatcgcttgccatagaccacaggtctgggtgtcagcagggagatttgagggtaggagatcaggctccagagtccatgctacccacactttgatggataagcaggaaatgaacatgaataaacaggtcagagcctcaagaagccctcccatttgctcacctattcctagctgcatgactgtgaatagagaattttatctctctcaacctcatttttcttatttataatacaagaatacgggcattaataactgtccttttcagaggatccaatgaagtcacagacataattatggcttggaaactatcaggtgatgtttaatatgtattagcaatatcgacttcttttttccctcagaatttgggtacaaaaataaacaaaacaaaaccaggaagtggttatctccctagcacctgttccccgatcatactgcttccccctttctggcaataaaagtactgaactatttcctcttatatcttagaattaccttcattagctacagtctgcactgtgccatcagtgttttgctcaggatttcacaaccaagacagcccaatgcagggcacatgtgcgtttcacctcccgccttccttgcccacaacagaaattgataatcaagtgtagatctcactgctgttagccaagcccagatactgcctcagaatccttcctaacaagtgatctaagtagccatttgctattgccaatcagacacaatgaaattctgagattaaatgtttttctcattcctgttggaaattagtctaaaatgcaattacaagcagaattgagagtttaaaaataaggggactctttgaaatatgaacttgatagtagacattgggctactgcagttctgtcacaaattagctattgggcaggtggtttagtcttttgttctaaagtaggagttggcttctgatctctaacagaatctattatatattctgagctacaaattatttttctaacttttaacatgttcctaatttatttttgcctttcctctttcccacctgaagtgctacttctaattatttatcttcgtccatttaagccacactgccatactttcaaattctgcatcctccacaaagcagttttttggcttctccaattgatagggaccacgtcttccactggccagctctaactttcatcacccatggattcagctggcaggatatgttctggcaaacaagactgcaagctccccagagggcaggccgaggtattatgtttctttgaattgcagtgccctgcagagagttataaacatagtagatgctcaatgataaatacgtaagtttaacagctttataattttcaaaacgttttcaagtttgtttgtttgttttcaattgatacaatgtccctagtagttttaaccctagaaattttggttaataccaatatctagggaaaagattgaaacttgctcttctaagttatactttaaatgcattttgttttttcataaagactaaatctaactcattatgccaggaggaaaataagtctcaaataataaactcaagatattttttaggttttagctttaacatgcatcactctgaggctggttttaagtgtttttagttattttctttaatattattgtacatacttaagtatattttgcaattcatatgtaattcatccataatatgatcatataaaatataacatatactataatttataacataaatattttataacttgaatatagttataatttatatagttgtatgagttttataattatatttaatttttgtactataatcaattattatttatactctctctttttaaaaaagtttaattgaattttctagagtgtagctgacgtaatgagatgtactataaaaaacggctttgtggtttttacttcccacttacctttaccccatgttttgttttttgttttattttgatgtgaaatattttgcttttttctctttccaatgctggcttccccattgtgggcccttctagttagttaggtctctgggccacatcagggagtattaagaaagtagagagaatgaagacacagttggattatatgatgaagaatctaactggaaaaaaaattccattatcaccaccctggaagctgagcttttttcttcacatcaaaggaagggagagaaggaggggaaataagtcttcaaaatggatttcctttcaatttccacttcagttcactgtggttgggtgtttagtacattccatactctcagaccctgaaagaacttgaatctgactttcacacattgggaacttcaactcaagcagatctgacaggagaagacagacgcctgaacagatgcagcttgtgtagagacagattatttttttaaccaaaagttgctgatttttcttctaaaaaatccttttccctgatgagataagttttaaagtgtgaaaatgttgacatttttctttgcacatcacaggtttactgtgcttatttttattttttatttttttgtgtctaacgtaatcatcctatggaggctcaagaaggcaatatttagattctgtcaaaacccctgggctattgccatgttttctgaaacttctagcacttcactgagtgtaccaggggccttgtttccccaatgtgtgaattgctgcaaatattaaaatgtggccagtgctggaatctttgttgacaagctgatgaggttcatgtccccagagctcctttcaagtctcactactcttgtcagagaaatcactacacctgctccaaattgctacctgctgagaaaattagaaccttacaggcacctgaaaaggttgtggaaaagaggtgagaattctgaacaaagaaaggagatcttcatatggacaaggtaaacttagttggtgtaaaatacacacatgacctttgttctgtatctaacatggagagagatctgagaacagagataattacagagaaaatggagaaaaatgcttgaaatgagtattctctctgttagtccaagatctacagtttctgtaaccatgcagcaaaacataccacataagttggttgggtgacttgtccctgaatgtaacaatgagagaacaaaaccaggagagaaaaacccatattctctgcctccatttttttctttttctcaaagacttcatttccttctttctttagagcaggtgccctcagagtgtggtccctggaccagctgcatcagcatcacctgggaagctgttaggcggactagttctagagccctatcccagaaccctagaatcagaaactctggggtgaagctcagcaatctgtgtgttcccaagcttgccatatgttcccaatgcacacaaaagtttgaacgtcattgctctagtgtagggtatcatctgtctctgactcaattattgatttattctcatcagcatgcaatatgtcctagtatctgctacattttaaaacaattctcccttatccttataacttccagctatcttccatctctctcctctctcacatcactattttttgcttgttaaaatgttgtctatagaccaagatacagaatgggaaacctcagacttcattccctcatagagacactgacttaacaatatactgcccaaaaagtcgttagaagtattccagaaatcagataaaaagttgcagtaccccagacatgttcaaatctaagaacagatgcattgaaatggctgtaaaaataattttatttcactcataatagttctccaccaaactggcatggcatgatgcaatggggagtaaaagtcaagcacacaacttcttcatcaggagtgaaggataagagctgaacatttgtccaactttccagcttttagaggggctgacggagggactggattctctgcctcacctgaatcagggtgctgagtaggaactggcatactttctgcgcctggggccactgagaacaaaagacagttcagtggcttattgcagcaccagaaaaccttcagtatcacagacaggcgccagtacagctcagggaaattaggagagaatgttcaattcatagcttttcctccaggagcaaggaggagaagagtgaaatatgcagccaatgttttagctttttggggagatttattgcctaaggaattgccttctatctcccctgactagaagcgatgatggagcaggtatactttggttacctagaagctgatgagctcaaaagagagctcaacagcttgctgcagagccagagggaacaagagattacaagcttctgaaagaaaattttttaaaaaaaagcttgtaaccctttcttggaagttacacatataaattgtgagacgatgcatttcccaaaatgtttgagattccctccgaatctctagctgggaggaatggggaaggtcttctgtacaaagccagtccctagagactgtgaaaggaagcagtgtttccaaatgcaaaattcccaccaaaaaataaggcatataaacaaacagggagccatggcccaatcaaaggaacaaactggatatccaaaaactgactataaaatgaacagagatttattaatttgaattacctgacaaataattcaaaataattttttttttttgagacagagtcttgctctgtcacccaggctggagtacagtggcgtgatcttggctcactgcaacctccacctccctggttcaagcaattcccttgcctcagcctcccgagtagctgagattacagacatgtgccaccacgcctggctaatttttttgtatttttagtagagacggggtttcaccatgttggtcagactggtctcgaactcctgacctcaggcaatccaactgcctctgcctcccaaagtgctgggattacaggcgtgtgccaccacgcccggcccaataattttcttttaaaaggtcaatgcactacaaaaagcacagacagaaaactaatggcagcaaaaacaaacaaaacacacacacacacacacacacacttgaaccaaacaagactattaacaaagagaaactataaaaaaagaaccaaacagtaattctgaaatacattcactgaattaaagaaaaaaatactagagaaattcaacagtacaattgaccaaatagaagagtcagcaaaaccttatgagacagtgacaagctgaccaatatacacattatgaaaattccagaatgaggagagggaaatgggtagaaagcttattttttaaaatgaggaccaaaaccatcctactgtgaaggaaaaaaaaatggaaaacaagtatggaaagtttgattaacttcaaataggataacccaaaaagactcacatcaagatacacaaaacgaagcactcaaaagtcaaaacaaagaaacaaccttgaaagtggcagaagaatgttgactgtcacatacaagggaactcccacaagcttatcagtgaattgctcagtagatatgtaagaggccagaaaggagaagcataatgtatgcaaaatactaacaggaatacaaatgccaataaaaatactctaacagaaaaaactgcccttcagaaatgagagcaaaataaaaaccttccaaaataagcaaaagctgaagatgttcatcatttccaatctgccctgtaagaaatgctagagggatttctccaagttgaactgaaaggatgctagacagcaacacgaaagcaaatgaaaatataaagctctctcatcatggtaaatctataaacaaacacaaaatcttatagtattgtaatggtggtatgtaaatcacttttaatggtggtatagaatttaaaagataaaagcataaaataactataaaactatgttaatggatacaaaacataaaacgatgtaatttgtgtctgcagtaacatatagcaggagacggagacgtaaaggtgtagagtttttgtatgttatggaagttaattatgagtttaaagtagactgttataagaacgtttatgtaattcccatggaaatcacaaagaaaatacctgtgtaatcccagcactttgggaggccgaggcgggcggatcacctgagatcaggagttcaagaccagcctgaccaacatggagaaaccttgtctctactaaaaatacaaaaaattagccaggcgtggtggcacatgcctgtaatcccagctactcaggaggctgaggcaggagaatcgcttgaacccaggaggtggaggttgcagtgacccgagatggcgccactgcactccagcctgggtgacaagagtgaagcgaatctctgtctcaaaaaaaaaaaaaaaaagaagatacacagaggaaactgagagtggaatcaagattgccaccaaaaaagaacaaaggaaggcagcaagagaggaagagagaggaataaaaataaatacaagacagaataaaacaattaacaaaatggcaatagtaagtcctttcccatcattacttactttaaatgtgaattgattaaattgcccaatcaaaaaacatacagtggatgaatgcatacaaaaatgagatcaaactctatgttttttacaagagattcactttagatattagggcacacatagcctgaaagtgaaaagtttagaaaatatatttcatgcaaatcgtaaccaaaagagaccagaagtggccatgcttatatcaaacaaaatagatttaaagtcaaaagttgtcacaggaaaaataaaaaggacatcatataatgacaaaagtgtagattcaccaggaagatgaaacaattgtaaatatgtctgcacctaacaacaaagtatccaaagataagaagcaaacattgacagaattgaaagaagaaatagataataatacaataatagttgatttcaatactcagttttcaataataaataaaataaccagacagaaaattaataggaagtcagacttgaacactatagaccaattagacctaacatacatatagggaaggtttcactcaacgagagcagaacacattcctctcaagcatacatggaacattctccaggatagaacacatgttaagccacaaaacaagtcttagcaatttaagaagatagaaatcataccaagtttttttttttctgggcacaataaaaataaaactagaaatcaatagcaaaaggaaaactgaaaattttacaaatatgtgaaaattaaacaacacactcttgaacaacaagcaggtcaaagaagaaatcacaagggaaattagagattgggtgctgtggctcacgcctgtaatcccagcacgttgggaggccaaggcaggcagatcatttgaggtcaggagtttgagaccagcctgcccaacatggtgaaaccctatctctactaaaaatacaaaaattagccaggcatgatggcaggtgcctgtaatcccagctacatgggaggccgaggcagaagaatcacttgaacctgggtgacagagtgagactctatctgaaaacaaacaaacaaacaaaaacaaaaacaaaacaaaacaaaaaaaacaagggaaattagaaatgctttaagataaatgaaaattataatgagggacgagagagaccctctcatattgttttatattgttttatactcagtacctgttttaagaaaaaaacaaagaagtgaaatcaaagagaggcagcccggcaccaggcccaaaaccagacctgggcttacctggcctaaacctagtagttaaaaatcaactcatgacttagaaacagatgttattcatagattccagacattgtatagaagaacattgtgaaactccctgccctgttctgtttctgtctgaccaacggagcatgcagcccgtcacgtacccttgcttgctcaaatcaatcacaaccctttcatgtgtaatcgttagtgttgtgagcccttaaaagggacagaaattgtgcactcgaagagctcggattttaaggcagtagcttgccgatgctcccagctgaataaagcccttccttctacaactctgtgtctgagaggttttgtctgcggctcatcctgctacaataatacaacatataaaaacatggtatgcaacaaatgcagtactgtggaaagtttacagcagtagatacctacattaataagaaagatttcaagtcaacgacttacctttatacttcaagtgactggaaacagaaaaaaaaataaaacacaaagttattataaggaagaaaataataaagattaaagcagaaacaaataaaatggagaataaaaaagcaatagaaaaaatcaataaaactaatagttgcttttaattaaagatcaacaaaattgacaaattctcagttagactaagaaaaaagagagaaagattaaataacaaaaatcataaataagaagagacataactgatgccacagaaataaaaaagatcataagagactactatcaacaattatataccaataaattggatgagctagaagaaattgatacatgcatagacatatacaacataccacaactaactcatgatgaataaaatatctgaacagacctatagcttgtaaagaaatcgaatcactaaccaaaaatctcccaacaaagaaaggcccaggaccagatattttcactggagaattctgttaaacatttaaagaattaatgttaatccttctcaaactcttccaaaatgtcaaagagaagggaacacttccaaacttataagaatagcataaacttgggctgggcgcagtggctcatgcctgtcatcccagcactttgggaggccgaggcgggtggatcacgaggtcaggagattgagaccatcctggctaacacggtgaaaccccatctctactaaaaatacaaaaaattagccgggcttggtggcgggcacctgtactcccagctactcagcaggctgaggcaggagaatggcgtgaacccgggaggcggagcttgcagtgagccgagatggcgccactgcactccagcctgggtgacagaaggagactccgtctcaaaaaaaaaaaaaaaaaaaaaagaatagcataaccttgatacccaaatgaaaaatgctgcaagaaaagaaaacaacagaccaatgttcctgatgaatattgatgcaaaaatcttaaataaaatactagcaaaccaaacttgataacacattaaaaggaccaacaccataattgtatggaattttttaattcctggaatgcaaggttgttccaacatgtaaaaattgatcaatgtaatatactacattaacagaacaaaggtcaaaacttatgtaattatctcaattgatacaaaaaagtatttgacaaacttaatgccctttcatgataaaaacactcaaaaaatcaggagaagaaaaaagttacttcaatgtaataaacgccatatatgaaaatcccacagctaacattatactctatggtgataaagtaaaatgtttccctctaagatgaataaaacaaggatgcccactctcacaacttttattcaatataatactgaaagttctagacagaacaactagataagaaaaagaaatggaagacaaccaaattgcaaaggaagaagcaaatttaactctgctcacagtagttagaaaactctaaggattatacacacccacacacaattagaactaacaaatgtagcaaaattgcaagatacaaagtcaatatacaaaaataagttgcatttctatataccaacaatgaacaattcaaaaaggaaattaagataacaatctcattaaaaatagcagcaaaaggaataaaatacttaggaccaaaattaaccaaaaaggctaaagacttgtacacagaaaactacaaaacattactaaaagaaattaaggatacaaataaatggaaacacatcccatgttcatggagtaaaagacttaatagaattaaaatatgcatacctcccaaagcaacttaatatgattaaaagtttgtattatctacagattcaatgcaaatcttatctaaatctccatcaaaattccatgatttttacagaaataggaaaaaaaaatcatcctggaatatatatgggatctcaaaacttgccttgcatagccaaagcaatctgagaaagaaaaacgaagctggaggccttacactttctgacttcaaaatgtattacaaagctacagtaatcaaaacattatagcactggtctaaatacttagagatcaatgaaacagaataacaagcatagaaataaactcttatgtatatggtcaaatgaaatttaaaaagggtgctaagactgcataacagggaaatgatagtttctttcacaaatatgaccaaatttattttctttgtgacaactgtcgctatgaaacattatgctatttattttctgttttactacctgttgaccacctctacatacacaacgcagaatataagctctgtgaggaaaggaaactcatcactctgtaatgttccctgatgtactccagcttctagaacattgatattaattttttaaaatgtagatgaaataaatgaaagagcacacctttcattctctcatgctcaccctgcttcagactaaaatggcccttcctatgccttttatctggttagatcctttggctctcagtagggctcaagtattgcttgctctaggaagctttctctaattttgtgaaatctctctcttgaaaacacacatctcctttgtagcacttatcacagttgctgttttcctgtttatgtgattgcatttgactcgttatctgtttccccaatggcagagacttcattttgtgtcacatcttccaccacctcaatgtgcacaataacttctccataggggtttaccgacaaatccctctagtggcttgctgtcgcatgcatctgcatcctggttttcccaggacagctctggtgaatgactcttgccctggcatcactgtagataaaagcatcgcagtttggatgatcaattatatggtccctccagttatgcaacactggaggtattactgaaaatccagcaggattaaaaatctaattaaatcatttaaacgtgattagcttttaagtagtatttacatataaatcaacattttgaaactgcaggtcaccacctaatagtagaccatgactactgttttgtatgtgtgaatctggatacactagaatagcatatatagcaaatcatttgaattgaaccacaagtggacaaataaacattatttgggaatactttctttaaaatgtagctatggatatgtaggtaataatgcaaagtacttagctttaggctgtgggttgaagtgatgctgagggtccctcccagatttcacagatgaggctggtgcagccatctcccagtcgctttgagtgttggctactaacagtttgaaaataccctcttctcaggagaattgttctccaaagagccccgcccctggaaaaaccttgaagttttcctctctccagggtccagtgatgaaaataagggtagtaaagcccaggccctgacctcagggggatcaactatgcagtacgttttatgttccagaactttttagtgggatcaggctgaagccagattccatatgagcctatgtcctttccaggcttcctcccctgccccatcctgcttccttcactcccatacagggtcctcccgaaaagcctctctcagcacatctctacaaaaatccacattttgaattctaagaacttaacctaaaacagttgtcattttaaaaatatgaaaaaaggctgagcgcagtggctcatgcctgtaatcctaacactttgggaggctgaggtgggaggattgcttgaactcgggagttggagacctgcctcagcaacgagaagcaaaaccctgtttctaaaaagaagaaaaaagaagtattaaaggaaataacactccatagtctatataatttaatcaatcaatatgaatacattgttttcaaattatactagtttacatttacagttttcactttctgcatattctctagaaaacgtgtaaatttttacacagaaatcttgaacaagcaaaatgctgtattgtttttggaaccaagactcaggaagacaggtgtgccagccatctgtcagcatgctggggatgctcttccccaaaatgtgtcagtctggacatcagttcagataagactcaaaagctacaacgcattgaggaacataggatcaaagatgaagccttgtttctttctgtaaaccaaagcaggtaaatggcaaggctgctttggaaaatgtgactttggagttagctgtgctttttcactgaagagtcctcccacttcatccccagacaggagacaaacaggcagtcagtgcagattccccaactcccaaagtcatcagggccacctgccagccagcccatgcagcatctactgggtccctgctgggtgcctggctccatcacctcacgctgctcatcgtttgacaaatgccaaggcttctgtgatgatgcctctctcctggggttcatggaacagtgtccagacaagagaaaataaaccacaggctctgaacaagaagaacaaatgggagatttttgtaccagtcaaaaacaggctttggaaaacataaccaaggggaacaagcacaccttagccacaccatcatgatatttccgttggaaacttatttatttatggagaactcacctttgaaaggcatttcaaactgtttttagttttgggggggggttgtgtctgtgtgtgtgtttgtttgtttgtttgtttaccaatatcgctaggcagaaatcacctgggtttgctgaaggttttgagagaaaagggagtggaaagagcaagggaaaaggaagaggctacggctgaaccaagaataggattcttagaaactcacaaaatagccactaagtaaccagagtaattagcccaatattctgtacagaacaagagctcctcattctctctcagtatcccttcctaattagaaaccaattatcaggatttgctaaataaattctcattcctccgaacaacgaaacatgatattaaaaaagagacagatctttatggtttgatatgaaatatgctccaagatacaatgtttaatgaaaaaataaaattaaaaaaaaggaaggtgcaaagtaatgtgcaaaacatttgtggcatagcaacaagaatcactttatatatgtgcacatataaagtatatgaataaatatgtgtcacacaatatgtataatattctatatatatatagacacacacatatacatatacacgtgtattttgagaaattgggaagcagatgtgggagggatctccctcatcttgacctcagggagatccttttcactgtttgctgttttcctggaatttgtattttcccatatgcttcttttttttttggagacggagtctcgctctgttgcccaggctggagtgcagtggcgtgatcttggctcactgcaagctccgcctcccgggttcacgccattctcctgcctcagcctcccgagtagctgggactacaggcacctgccactgcgcccagctaattttttgtattttttttttttttagtggagatggggttttaccgtggtctcagtctcctgcccttgtgatccgcctgccttggcctctcaaagtgctgggattacaggcgtgagccaccgtgcccggccttttcccatatacttctataacctattcataagcatttaaaaagactgcaaccccaaatcaaaaccactaataacatgctaaacaatatgagtttggctgtgaaaaatggatgattaaatactgctgatcatatttgcgaagccaaattcttacaatctatatgttatttattggaattcctataggtgctttgaaaatattttgatgatttttccttcccaggataccataatgggttcttaaactataactgctatgttttagtacagtggtcttaaagagacatctgtatttcctgattcaaaattgaacccttaggcaaaatgtatgcagagggagcacccagattttcccatccccaaaataattccaaggctgccttggagagagattgtctggaacaatgggtcaaagtcacacttgatccttatgaggaaaagactaagtaactttgaataaataaggtatttatctctttgtaagaaagagtgattctgagatagatgaagactttgaagttcagattgattattgattaatactgaattgtattaaggagtggcattcttaatcttttcaaaaatattaggaataaggactggaatctctagaatgtttacttgagcacaaagtgtagcacaggcctagaaattctcaaggatgtagctgctaagagctaaaaatatcttcaggggaggctgtgcagagagagagtagggggaggaggtggagaacccggaagagcagctctgagcagatttcacacgattaatagggggtttgttggctggtggactttaaaaatagaacctaatttctgaggggtgggtgccctgctccagagccctaaaaggagcctgctgagagggatgattaaaatgaaagattgtgcagctttaaggaaatgttggcctaaagaaatggcaccaattactgatgctccagccaccttctaaaaggtttctgcaaattgctttccttggatgaaataccaaatatctgttcccaaatgttatgaagcaaaataaatcacattccattgacacatctaatatgtcgtattagagaccctgaatccaaacaaagccaagctgctgttaccaccgagctattacatttctttctcttgcttttgtattaaggctgcaagatgaaaacttgttccttgcaaacaaacaacaattatctctgcctcctccctgcattagaggagaaatcaaatcagcacctaacaagattttagaattcaaaagtaactcagaaataattgactctaacccccaactcttgtaaataaagatggtgaatcccggaaatcataaaccacttatccaaagttgctttgctgaagagcaacacaagcagaactagaatccagatcactcaactctcagcttatcaataaataccccttttgttaaataggcatacactaaagcattcaaggtagtattcctttccaagactttgcattttctctaaaataaaagtttcaagaaaaagatgattttcaagcagtagcgagtgcacaaaagtggcatttttctgacatatgcaggctggagtacagtagcgcactctcggctcactgcaacctccgcctcccgggttcaaaagatccttgtgtctcaacctcctgagtagctgggattacaggcgcccgccaccatgcctggctaattttcgtatttttagtagagacagggtttcaccatgttaggctggtctcaaactcctgacctcaggtgatccacctgtctcggcctcccaaagtgcggggattacaggcgtaagccaccacacccagccttctgttgcattttatagatgaaaatactgaggagcagtgcaattgacagtatttatccaggtgtagaagttgctattggatcaccttcaccagcacgtatgcccatctctcaactactgcaagtattggctgctaagaactaatggctgcctccttctccagtgaatatgcctgttctagaaatgcctgagagactgccaatgaataattgatatgggctacaaaaggccagccatcttgcttcaactgtgtggttttagtcaccctccaaagctccccttgtggtcagactgaagctagactccagctgggaccacttcctattcaactccttcctctgctcttctctgcccctgcaggtttgtcctgagaacttgccttcaataaatcaagtgcttctaggaaagctgaccagaaacctcaagtgagtgtgtaggagggatagtaaatgccagatagcaagttgtgatagtctacatcttttccatctcattttcactttggtctccatgcaaacgtgtaaagagacagggagttctgcatatttctgctgtgagcagatgcttgtgatcttctttggtaatatggaatgttttccagcttttctgcttagtcatatgcattctgacttgtctattcaattttgcagcaccctttcagtaatctttaaatttttcctaaaaacaaataagcaaaaggaagatttttttttttttttggtatggtaatggataaacaagcaaagaaacagacatgcaggcacaatgagaattcttagtcactgacctgtaatggagcttgggtgactctcttgccctctgactcgagttttcctatgtgtggtaaggagtttgataccgagggctgagactgtgattgatctagcagatcgagagccctcaacagatatttagagtgacaaaaagctcatcagtttgctcagttgagattcattggctgtaagaaacagaaaatgactcttcccagctgatcccagtgtgacagttaattttagatgtcagcttgactgaataagtaatacctagaaacctgttaaagaattatcttgaggtgtttctgtgagggtgtttccaggagagattggcacatgagtctgagtggagtaggtagagaagagccactctcaaagtgggcaggtaccctccaatctgatggaggccccaagagaacgaaaacagagaaaagacaaatgtgtcaatctatctgctggagctgggatacactcttcctctcctgtccttacacaattccaggctcccttgcctttggactccaagatttacatcagtcccccagcaggttatcaggcctttggcctcagactgagttataccatcagcttccctggttctgaggcctttggacttggactgagccatgccactggcatcccagggtctccaacttgctgatggcttgttgtgggacttctcagccaccctaatgccatgagccaattcccttaataaattctctctcatatgtatatttctatatctacatcagtatattctcttgtttctgtctggagaacccagattaacatactcagcaaaagtggtatttattgataaggtacagggaagctcagaggattggaacaacagatatggagagagtacagagcagacaatgctgtgcagccttgtttgagggctgctacagaatgctattccatttgctcttcggattcaaagttcgggtagagagtccagctagccaggctgaggtcacagcctcactgctcgactatactggatcaatgagagtagagatctagggaattggctgtctaactccagctgcacattaaaatcacttgttaggggctctaaaaccctgatacttaggccacacaacaggttaatcaaatcagactacctggaggtagaaccaaagcatttgatatttttaaaacccccaaagtgatttaataattagccaaatttctaaaatactgatgtagaggaaaagccttcagagagtacttcaaggtttttgtaggaggacaggatgcaatgcttaacatcatggcatgactataccaaattggaaaaaaagataattttccaaaagaaaattgggttacatttaagaagcagggaggatgaatactaaatcgcaaatcaatgaatccgttaaaaacagacaaagatccattgcacaggcaatctagtcaaacatcgttctaacacttagagtaaggtctggcacataagagatgctcaataaatatttactgaataaataagtaaataaataaccagagagtcttgaaatttcatgtaccatgtaactccaccaagagaattacctgtttttcttgtttaatccaagaaaccctctataatagattaaaaggagcaaactttgttcaaaaagaggataaaacaaagagattggggaaataaggaatacatttatgaaaaattattataaaatttctgtaggcttattaagctttgcactgctctactagaccctaatgttttgcctaacgttactgttgatgatcagattctgctgatctcaatttgctatactatactcttttttgtttacatttctaatactatcatctgccttgactggtcaaataaaggccatctgtttcatggttctaacaccttgttactttcagtatcaagttggtgggcccatagtgcctccctgaaagtgctagaaatgcagaatttggggccctaccttagacctactgaaggagcatttgtattttaataagatccacaggggagccatatgcacattgaaatttgaaaagaactggctagcacaaatggctcatatgcctaaaatggctgattgtacctgtcattcaaacccactgggaggaagtgtgggaacatggcattctgagcatggtgccttgattgctgctaccaactctaatcagtctgcctctcctaagacaaatagcaaatgaatgtagtgaagctctggcttctgctgggatcctgggcatagagaatggtgtaggtcttttgacctcataatttgaacaagtaaaatgataaacagcatcataacctacttaagaacccaaaaacagaaaattctgggggaagatggagcatacaaagatctgtggtcccttaagggagtactgatgtcaattcagtatgaacgtgccaaattcccaaaacactaaatgagagatgaacaagtaagctgagtatttccttccttacgggagagagactacagggagataagagaggcagcaggtgccagcctgcctgattctacactgcagctcagggggatagaggtgcctgtgctttccatgactgtaggatccctgctaggatactctcgccaccacactagaattccaatgggccagcaaaggaaaataacaagcgaactatgggaaaccattagccagagagaagatcaagtggaactgttaggacttacactcagcaaaatggaattattagagcagaaaaaaaaaccctgaattagaaaataaattaaaggtattttaaaggagatttgagtatatcttattcagcagattcattcaaagagaaaatggggctgctgagattcacatcagcaggcttggaaggtcaagtataagaacttctcaagcagacagcatataccatgagacagatgtcatgagagatccacagaatggaatcagaggcctaaaatgtgagtaatagtagttgcagaagaacaaaaaggaatgcatagagaaaaaccgacaataaatactagaagaataattccaagagataatgaaaacctgaagtagcaaatttaaaatattcactaagattcaagctggatttcaaaaaaagacacatcaatatgtacatcatgaaaaaattcctgatctctaaagaaaaagaacatctaaagtcagaaagaaggaattcactataaaataataccaccaacagtggaagaaaatggacaatggaacagaatcaacttatatccagccaacatatcattactctgtcagggtaaacaaaaactacttgaggagagaaaataatttggaaagaataacacttcaatacgacaaccgagaaaagtactacaaagactctatcccaatgacaaatgaaaaaattcagaaacctgaaaagatgagtgagcaatgattatgtatacacaggttgcacatacatatatgtgtatatatttgtatgaaatatttatacaagctcatatatagttattcagccatataggtaaacatgaacaatgttcataattgaataagaataggttatattgcaaagtataatattaaaaattaatgacaataattaagaaaataaagaaataaaattaagaaaacattaatttttttaggaagttaataaacactagatctcatctgtcaagcctaggagaaatggttaccagggaaatagcaaaaacatttcagcatctctttagaggaattacaaaaggaaggaagaagagtggaagtatctttttaaaatttcattttattggaatgaagcaaagtagaaagaaaactgctggtttttttttttttttttttctgaggaggagggagaagtctcctttttaaaggatagtagatactgatatctgatcatttagatcaagataataaaaattaaccatcaataacaagggagaaaaaagtaggctttcccaagctagcaaagagagaaaaagaataaactgcacaagtaaaacacagaaaaagaagaaacagctatatgtccaaaagtaaatctaaaatcagataacagtcatatagcaagtatatcagtcaccatataaaatgtaaaagaataagatttcatcatgaaaaggcaaaggcaacccatttctttgacaaacaaaacacagctagatgttatatataagaaatacttaaattaaatttaaaataacataaatataaatgaagtgagcaaaaagatattggaaaaatggaaacaaaagggaaccaaaagtgacaatatcaacaaagtagaatttaagggtggaagaaccaggcaggcaccaaagggacatgatatagtgaaaaatggcacaattagagatatacagcagtcataactgatgtgaggcgatcaccataggacctcaaagcttaaagcaattttatttgaaatgcaaggagaacttgctaaaaatataattatgatgaaaacatcaatatccttctctcagaactgaaagatctagttaaaaaatagaaaacagagaaaataaaaaatacaattaataaacaacttgatatgaattataccttatcccttgaaagtacttttaaaaatactcctagaatatttataaaagttggtcatatatgtcgccactggggaaaaagtaaaacaggaaagtgtgtaagtgaatagcttttatagactacgttctctgataataagctaataaaactagaaataaatgataacaaaaaatcttaatgtcttgacacaatgaaggagcatgcttctagatattctttgatcaaaaaggaaattaaaagggaaattagaacctgtccaaaggtcaatgaaaaggaatacgtcatccataataaaacctacaaaacaaatcaaaagctatcattagaggaaaatttatagccttaattgtcttcattattaaaagagataactggtttaaaaagtaatttttcatctccaaactgaaagatgaacagcaaaattaaataacagttaaggacattttaaaatattttaaaatggggaaaaaagaagagacaaatgatttcaaaagcttgtcctttgaaacattaataaaataggtgaagtatctcatgattctgacaaagaaaatttcgaacaaaagcaaaagcagatggaacaaggaatgagaaagacatagccacaaacacaagagattaaaattgtggtgagaaaatactatgtctaactctatggcaacagataaaaatgaatctttttttagcaaaatatctctagctcaccgactttcacaattcctacccttatttcaccatattactctcctttttatatatctcgttttaaccaagcaccgtctcttctatgcccagctcccctaccttgaattggcacatttttctgcaatcgagagtcatttagtttgactggcctactgtgtgcctgagaggagagctcagtatgcgctgattctctactcttattttcatacttttcttccaagttcctggagcatctcttgcatgcaccccattgaggccatgcgtcgcagctctcgtctccttaaatatttcagagcactttcacattcattgtagtgtaatctcacagggttcttttttctgttttttaagtagcaattttcaagattttagactgaaaagtaaatgttatactccaggtgatagttttatatgaaaagtaaaatgaattattttgacaagctaagtgacaggaagtttttcactactttttaattatcaaagacattcacacacacacacacacacaggcgcagagaaagagagagacattcagaatagagctaattatattatctcaccaggaagaaaagtcagccatgattttcagcctcaagagatttaggatctagtaaaagtgcttagaacttagtgagattttagaagttgcctaacagtttatataactggtagggacctaactgataggagtgggaatctacttctgagattcctattttcctcaaacctagacagtctcttacgtggatcacgtgcttttcagatcactgtaaaaatagtcttaatttccagagagaaaaaatatgtaacataatcaataacaaatgttcactctattagcaagtgtttgctgtgtaacaaaccactctcaaattagtagtttataataatgacaaattattcagctcacaagctgtggatcagcaatttaggctgggtttggctgggttgggagttctatggctctcattgggcatttgcatgtcagctcttgcttgtccaggagtttggctggggcaactgggttgatcaagataataaaaattaaccatcaatgacaagggagaataaagtaggctttcctaagctagcaaagagagaaaaagaataaacagcaaaagtaaagaaaaagaagaaacaactatatatccaatagtaaatctggtttatgtgatctcaaatcatgcagcagacttgctcattctttttaatgtggcaacgggcaggctttgtgaaagaatcagtgtgtgaagcatcttaaggcacagacttgaaactggtgcaatgcggttactgccaaattctattggctaaaggaggtctcaaggcctttccaaggggtgaggaaagagactgtatctcttaacaggagaagctgcagagagacattgcaagggtgtagatacagagcggagaaggatcacaatctttttgcaactccaataacctacatatcatttccgtcctgtggatgcatgcttggcccacaggaaacgtcctctgcacctattgtcaattccattcaatctctcaccctcttgcttctccagttaggtgtcaggcatcagtccctgtgcctcccgcctttaaactccataggcacatgtcaggttttccaagtggagctccataaccaacccctcctttaacttcccccctacctttcttctgtggttggggaaattcatgctttccaacaattctctccactatcagccctcctcagcatctcttgatcaccttgtctccatttatgggtgatgtgctaagggctgaaaaactagtttcatcggcttcttagtttgggtacctgtagaagcaagaggggatgtgaatgcaagattagttagcgaggttatctcaagaaacacagattggagagaggaaaaaagagatacagggaaaataagaaagccagtgcaaggtgtgtttttcaatacagttatcactgtgggcaaaaactctgggagtcagtgtacagcacaggtcttagagttgtcccacctgggagtgagagggctggatcacttatacacccatctatgtataaatacaccattttctacactctatctagcataaactgagcgcagctttgggtgagagttggttaattccctggcacttccagcctgctgtgaagatgtgtaggcagagaaggcatcaacagccagaaaaaaaaagcatccagcaagaaagagaggttctggcagttgagaagtcaggcccgtttacactgaagtgataagagtgagatgtggtgatagctccctggctgtcatccttgtcctctgtcaatgtgtagcaacaccgtctaactccaaggcaacaggacacattgaatttagcattctaaaataaatgcaatactctcaaaatgtcattctcttagtctcatcctctctcaaaagcatcctgtatccttctagctggtccctaattttaccattatccatatttgcattcctgttgttcagatagcctttattcctggtactgagatttgttgctctccttttttctttacctgtattctctattaccataaattatccttggaaatatcttctctgatatatatctttgcatctactacatggtctggcccacagtagaggctcaacaagtatttctggaataaatgaattaataagtgagattcattattctttgcaatcaggcatctagggtattttccatgacaataccaaacacaaaatatagttgtgtattatctcttctaggttaccttgagaggtgcaggttctcattacctgaaagtgtggattagtttgaaccagtggtttatcatggaagaaattcaacctgacaactcccatttgtcatagtcattgtatttcatgcaacttttaaaacttgtgaagtgaaggtctatgcctatcactttctatttggtaagcataggtttccatgagttttatgcattatctaagactaagaaactgcatttctgtctcctgccaccttcgtcccctctttctctctgcgtctctcccttctgtctctcagcacacatacaaacgtagcaattgaattatgctttttcatgttgttctctctgccaagaattttattttactctcatcattgtctatacacctcaattgtttttagtaaactttctattgatgtaaaacacacaaatagaaaagtacgtaaatcatgaaaacacagctcggcgaattttcacaagtgaacacgcctgctcaatcagtgcttcttccccagtcttggggaatccagcagtgcactccagggctctttctgttgagggctcctcactcttctgggaagatctgtgacaaccccactaaggctctctctcccatatagtttatgtccaggatgtggaaatccccaggggacccccttccccagggaaggccaatctctggcctctactctgctacatcttcctatcatggcgtttgttttgttttcccatgttgagtgctattagctgaccttctagctattatctaatgttagatctcatctataaatgtatgttacttcccttgctctctgtaatttctttaagtttgtagacggaatttgcttgaagggattctgttacatgaagtaacttacccatcagcagccctcgcctgttctttgtatagaacactcttacctttttggaaggaagtgccacgatttctcagtctaattcatggtgtattccctgtgcctcagacagtgcttggttcagtgcctatgcacaaatatttgcttaattaacatgggatgaatatttgcctggtttgaatgttagagattttttggtttcttcctaatctttgaatgagggcaactctcttacaccattcaatttattgaaaaacatccagacaggtttatgaggtggagaatgtgcagtggcttattaggtgaatacatagcaaattgggccagccagtagtatgaaaatgatggtgttgttttgtaatacttttctgctaattttctacagtctagcccaaagaatcacctatcagctttaaatgtctccccgcaatgcatacatgcatagctccccacaaacatccagtgagtatcattctgttcagtggaccctgatgaacagctgccaagctgggggccacttcctcttgtgaatccatactgcctgggctccaagccagttctctagagcagggatgcaggccgtgaaaaggaacaaccataaagatcaagtcttcaaactatctttagccctctgccccacggctatgctaagccaagtagcatatttcagggatctgttctccttttctgactaccaccacattccatttctctattatttcaagaggaacctctactatgttttcagagaacactacatcctgctgaaaatttgaatgtttctgtaattatttttggcatctttctctgaattagtccaaatttatttatctttagctaatattctctattgtctttagtcacagtcttcagcagtgtatctagttgcaggtctcttaatttatactctattctcacatcctaagcagatatcagagagaaatgtcagtagatttcaggagacaaaatggaaaggagccattgctccaccaccttttcctggaagtcttactctatattttaaaacaccttttttaattactaagatgctctgacgcaaatgttcacacattgcaactaaatgctactgcctttgaagtagaaagaaataaaataggaagaataaatcactaaataaataaatttcttaagctgaccattctcaaaggagactgtggggggtgacattctgttatcctcagtcaagccagtgggacaacacctaaatcagtgcctcagaagtggttgagcagtgagcttgtgagctttgaaactcttttaggtaacgtcttggctttgattgctactctgtccatatttatatcttcttgggttatgattctttgttcactaacagcaaatcagagattggagaaagaagaaactccgtcagtaactaatcacacatccattctaaagtctagaaaagctgccagaaaaccattctgctggactttggaagtgttgcttctcatgtgccctcctgagccaacttgtcatagatgttcctgtggctcctatgaaaaagtacttgtctgatgagggccacatgtataaacaggcccaatatggtatgcacgtataccaacccccaaccataggattggtgaatggccatggcaccatgtgggcacattccctctgttttccctctgcctccactcccacattatagccagatgctcactactgccccctgtgcactaggatctttttaaccaaacatttcaagtatatgggctatttctcaaactggttccacagggctctgaggtcccatgaggtgtctgatgggaagtgagggtcgttcaaggggaaatctgagcatgtgagtctccagatgcttcatcatcagttcagacagaattctgtttacctgtcttacttgtgagattccttacaaaattctgatgcaaaaaaagttctcctgctaagtctaaaaacttctgctacccatagaatgatgacccatcagtcttctgcactccaaaactgtccatatttttatcaagtactctgtaattaataatgcatcagatatttaaattgtgtaacttcacttcattttccttcttcctcttctgtcaatgtcctagtaaaatcaatggtctctcctcctcctcccagaattttggtggcaccctggcaggtcctaagccttttctttcaggcatataactggatgaaaggggactgggaatgggtgggtatgttggccagccataatcatgaggcctgggtgggactcccactcactgagcacactggcagcagctggccagagtcataattaaaaccagctttgctccagctttagcataaggctcaaaagtgacagtccatagtccatgggtctgagaatattcaggctaatgggaaagacatcttagacccgagtctctcaaaacctatcacagagacaacaatctaaacatctcaatgtccaacctcctactctcctgctttaatttactctgcagaatatgtggcatgcaagaagtattgctcagtgggccccactcccactagctaagacccactggcttggaaaccccaccagtcagtggcagcaggctggagactgcctaagatgactgagttcccctgggggagtggcagccaccatcactgcagccccagtcaatcattttctcctgccggtgccaggggactgggtggttcggatcaggaggaattccccacagtgcagcacagtggctgtggcagatcatggccagactgcttctttaagtgggactcaaatctacccctcatcactgggcaagactgccctgcagaaattccggcaactccagccaggggtatacagacagaactcttatctccctgggatggagcccctgtgggaagaggcagctgtggtctccacggttcagccaacttagtctctcctgcctgctggctcgggagagtccgaacagtctggatgaggggggttcctcccaatgcagtgcacccactctgccaaggggtagcccagactgcttccttaagtgggtccttgatcctattcctcctgatgggtgagaccttccaacaggggttgccacttacctcatacaggggtgttctggctggcaataggtcagtgtgcctctgggacagagctcccagaagaagaagaaggctgccatctttgctgttctctagcctccactggtgatacctccatgttaagaagggactcaggcaaataaggtctggagttgactcccagcaaacttcagcggtgctacagaagagaggcctgactgctaaaagaaaaacaaagaaatagaaagcaacaacaacaacatcaataaaatgacccacaaaaaaaaaccatccaaaggtaagcagcctcaaagtttgaaggtatataaacccacaaagataagaaagaatcaatgcaaaaatgctgagaactcaaaaagccatagttcctcttctcctccaaaatattgcaacacccctccagcaagggcacagaactgggctgaggctgaggtggatgatttgacataagtaggcttcagaagatgggtaataatgaactttgctgagctaaaggaacatgtcctaccccagtgcaaagaagctaagaacgatgataagacgttacagatgctgataaccagaataaccagtttaaagaggaacataaattacctgatggagctgaaaaacacaatttgagaacttcacaatgcaatcacaagtgtcaatagctgaatagaccaagtggagaaaagaatcttaaagactatcttgctgaaataagacaggcatacaaggctagagaaaaaagaatgaaaaggatcaagcaaaacctctgagaaatgtgggattgcgtaaaagactgaacctatgactgactggggtacctgaaagagacaggtagaatgggaccaagttggaaaacatactataggatatcatccaggataatttccccaacacagcaagacaggccaacattcaaattcaggaaatccagagaaccccattaagatactccatgagaagatgaatcccaaaacacataatcatcagattctccaaagtcaaaatgaaagaaaaaaaatgcaggggcagccagagagaaaggccaggtcacctacaaagggaagcccatcagactaacagtgaacctctcagcagaaaccctaaaagccacaaaatattgggtgccaatactcaatgttcttacagaaaagaatttccaacccagaatttcacttctggacaaattaagcttcatatgtgaaagagaaagaaaattcttttcaacaagcaaatgctgagggaatttgtcaccaccaggcctgccttgcaaagctcctgaaggaagcattaaatatgcaaaaggaaaactattaccagccattgcaaatgcacactgacgttcacagaccaatgacactatgaagcaactacataaacaaatgtgcaaaataaccagctagaatcatgatgacaggatcaaattcacacataacaatattaaccttaaatgtatatgggataaatgccccaattaaaagacacagaatggcaggctggatagagtcaagacccactggtgtgctgtattcaagagacccatctcacatgcaaagacacacataggctcaaaataaagatatggaggaaattttatcaagcaaatggaaaacagaaaaaagcaggggttgcaatcctagtttatgtcaaaatagactttaaaccaacaaagatcacaaaagacaaagaaaagcattacataacggtaaagggttcaattcaacaagatgagctaactatcctaaatatatatgcacccaacacaggagcacccagacttataaaacaaattcttagagacctacaaagagacttagactcctgcacaataatagtaggaaactctaacaccccactgtcaatattagacagatcatcaagacagaaaattaataaggatattcaggacctgaactcagctctggatcaagtagacctgataagatatttacagaactgtctatcccaaaacaagagaatatgcattcttcttggtgccacatgacacttcctctaaaattggaaataaatttcaataattggaaataattggaaataaaacactcctcagcaaatacaaaagaactaaaatcataaccaacagtctctcagacctcagtccaatcaaattagaattcaagattaagaaactcactcaaaaccatacaaccatatgcacattgaacaacctgcttctgaatgactccggggtaaataatgaaattaaggcagaaatcaagaagttctttgaaactaatgagaacaaagagataacataccagaatctctgggaggcagctaaagcagtgttaacagggaaatttatagcactaaatgcctacatcataaagctagaaagatctgaaatcaacatcttaacatcataactaaaagaactagagaaacaagagcaaacagaccccaaagctagcagaagacaagaaataactgagatcagagtagaactggagacagagacatggaaaaaccttcaaaaatcaatgaatacaggagctggttttttgaaaaaattaataaaatagatagactgctagctagactaatacagtacaaaaaagagaagaataaacagacacacttagaaatgataaggggatatcaccactgaccccacagaaatgcaaacaaccatcagagaatactataaacacctctatgcaaataaactagaaaaatctagaagaaatggataaattcctggatgcatacaccctcccaagattgaaccattaagaagttgaatcactgaatagacaaataacaagttctgaagctgaggtagtaataaatagcctaccaaccaaaaaaaaaaacaaaaaacaaaaaacaaaaaaaaccacaggaccagatggatttatagctgaattctaccagaagtacaaagaggagctgatactatttcttctgaaactattccaacaactgaaaaggagggacttctctctaaatcattctatgaggccagcatcatcctcatatgaaaaccaggcagagatacaacaaaaaaagaaaacttcagtccaatatccctgataaacatcaatgcaaaaatcttcaataaaatactggcaaaccaaatccagcagcacatcaaaaagcttatccagcatgatcaagtttgcttcatccttgggatgcaaggttggttcaacacatgcaaataaataaatgtgatttatcacataaacagaactaaagacaaaaactacattattagctcaacagatgcagaaaggccttcaataaaattcagaatcccttcatgttaaaacttcttaataaactaggtattgaaggaatatacctcaaaataataagagccatttatgacacacccacagccaatatgacactgaatgggcaaaagctgaaagcattccttttgaaaaccagcacaagacaaggatgccctctctcaccactccagttcaaaatagtattggaagttatggccagggcaatcaggcaagagaaagaaataaatggtattcacataggaagagagaaagtcaaattatcctagtttgcagatgatatgatcctatagctagaaaaccccattgtttcagtcccgaagcttcttaagctgataaggaacttcagcaaagtctcaggatacaaattcaatgtgcaaaaatcacaaccagtcctatacaccaacaacagccaagcaaagagccaaatcatgaatgaattcccattcacagttgctgcaaagagaataaaatacctagaaatatgactaacaagggaagtcaaggacctcttcaaggagaactacaaatcactgctcaagtaaatcagaggagacaaaaacaaatggaaaaacattccatgctcatggataggaagaatcaatatcattaaaatggcaataatgtccaaagtaatttatagattcaatgctattaccatgaaagtaccattgacattcttcatagaattagaagaaaactattttaaaattcatatggaaccaaaattggccatatagccaagacaatcctaagctaaaagaacagggctgaaggcatcacattacccgacttcaaactatactacaaggctacaataaccaaagcagtatagtactagtacaaaaacagacaaatagaccaaaggaacagaatagagaactcagaaataagaccacacatctacaatcatctgatctttgaaacctagcaaaaacaagcaatgcgaaaagaatttgctatttaataaatggctctggaagaactggctagccatgtgcagaaaattcaaactggacccgttcttcacaccttttacaaaaattaactcaagatggattaaagacttgaatgtaaaacccaaaactataaaaatcctagatgaaaatctaggcagtaccattcaggtcataggcacgggcaaagatttcatggtgaaaacaccaaaagcaattgcaacaaaagcaaacattgacaaatgggatctaattaaactaaagagcttcttcacagcaaaagaaacgatcatcagagtgaacagacaacctacaaaatgggagaaaattttgcaatctatccgtctgtcaaagatctaatatccagagtctatgaagaacttaactttacaagaaaaaaaaaacaaacaaccccattaaaaagtggacaaaaaacatgaacagaaatttctcaaaagaagacatacatgcggccaacagacatgtgataaaagctcaatatcactgatcattagagaaatgcaaatcaaaaccacagtgagataccatatcattccagtcagaatggcgattactaaaaagtcgaaaaaccacagatgctggcaaggttgcagggaaataggaacactttaacatcattggttgttagttcaaccattgtggaagacagtgtggtgattcttcaaatacctagaaccagaaataccatttgacccagcaattccattactgggtatatacccaaaggaatataaatcattctgttataaagacacatgcatgcgtatgttcattgcagcactattcacaatagcaaagacatggaatcaacccaaatgcccatcaatgatagactggataaagaaaatatggtacatatacaccatggaatactatgcagccataaaaagtaacaaaatcatgtcctttgcagggacatggatggagctggaagccattatcctcagcaaacaaactcaggaacagaaaaccaaacactgcatgttctcacttataagtgggagccaaataatgagaacacatggacgcatggaggggaacaacacatactgggatctgtcaggggtcaggggaaaaggagggagtacatcaggaaaaatagctaatgcaggctgggcttgacacctcgatgatgggttgataggtgcagcaaaccaccatggcatgcatttacctatgtaacaaacctgcacatcctgaatatataccccagaacttaaaataaaattttaaaaagaatatgtagcaccttttacacattgcatacactctacactaaatattattgaacatccccagttactcttcttctaaataaaaatatcagcaacacttacaggctgtaaatgaagtattacaatgttccttgaaaaaaaaagttctaaatcctatgattaaacaataattaaataacctgaaatagtttcatggtgttaaaaaagaaaaaaaaggagctgatgtgaagtgtttattagccagaatgtaataaatcttttttaaattgaggatggggaggtatgcgtgcatgtgtgtgtttatcatggctattaaacttaatttggtgctcactgagttgtaaaataaatgaagaatcactctacactctttatgtcagccaaatgctgggaggctaaaaatcacttgagatctagttgaacaggtgcacatgggggttttctgccaaagagatggagctgccagcaacaaaattctatttctttcccccagttctagctagaggaactgtgtttgttgatccttgacttcagctcaaaaacaaatgtgggtttcttggggactggtctggtgagatggatgagtgagggggctgaatgacatagacacacatcacacatacacacaggtgcagtctcctagggatgaatcaggtgacaccttacaagacctcagttctgctcccttattttatctgtagaagagagggctagaagaaagaaaaaggagtatcatttcctataatttgcttcaaatagagcagcaaattgttagtcatagtggaagggcatccataaataaagctttcatgagtggtttgtggcttccttaagtgtacacacacgtacaaaaatagaatatgtatttttgtgttttttaaatttttgtgtacatacaaaaatatttcaaaacagaagcatgtgtttattttcagcaagaaatgaaatatacctttgtttcttaattatgcctagggttgtcaagttgtaaaagggtagactgaagcttcagatcttattcagtccagaagaatgggcatgtgtcctagttattgggaagaaacttttggtccagggcttggttgccttaaggagctttccccaccgaagacttaggaggtttcaagcagaaccagaatcaatgttcttattaaagacactgaaagtgatatctatgttgtataatatgaaggccacctttccccaaatattcaaagcaccattgctttatttctgttggttaatctctttggataggtacacttcttccttaaattcctcttttaaaatgcaaatgcccacaggaaaacataatacatcatggcacaagttagttttacagatccactttctccctccctgaggtcaaatggaagagtgaaatcaaagtgagaaaatgttgacagagaaaggagataggctattgggtcactcatgtctctgcttcagtttgtgtaagtctggctcaaggctatctaagctagctgttagctgcccaacaactttgcccagttttaaagtttattaataatcattgaagctattagtatgcaaaccatccagcaaaagaactcaacagataaatagcaaagtcgagctatctctccaagtttgttgaatttccatccagcccctttgtctcagtcattgtcactctactgtagctttccaaaaggcttccccacgttgattttccccacaactcccacacattttcacaatgcagccagagtgatttggttttccaagatgaaaatctgacctagttagctctctgcttaaaactcttcagtgctttgtattgtccatataatagggtccaaactcctaaatggcccacaggcctgacaggggaaagctcccccagcctccgccagcatggcatctccctcttccacctgcttcccaagaactctccttcaaaagctctttgaagtccccacttctttcttcacctactcatccttaagatccaagtctcactccctcagagaatacttcctgatttctccaattagatcaaaatgagctataaatagtaagcattctttgatactacatttttctccttaacgataacctccaaagttgaaattgcccattggttttatgtgttatttggttaatgcccatctccccaactatattgtaaatggcaaatgagcaggaagaaaggctgtttcattaactctagatgcctaattagcctacatttcccagcctcctttttagttaggtatggccatatgccagggttatgaccaacggaatgtggacagagggaatgtggatcatttcaagaacagacccatatgaaatttgcatgtgtaatgctccatattattttttcttaaattgactggaacataaaaaaggataaagactttggaagccctgttttgaagacaggggtaccaaaaggcagaaaaagcctgagtcacaaacagaaggacatttacccaaactattcgggaatttttcatagatggaagcattgctctaataaaacacaattctattatccatggctagcatagtgtctaaaacatagtagatattcaacaaatgaaagcattggttcttggtatgtgggaaattctttgtacttggtagaggcaactgggtgtctgcatttgatcaggattttggggaacaatgccatttttctatgattatctgaagaagaatggaagatgcatagctaccaaggagagactaagatttcacataacaaaacatgactgattcttgactggacacggtggctcacgcctgtaatcccagcactttgggaggccaagcggggtgggggggggggtggatcatgaggtcaggagttcgagaccagcctggccaataaggtgaaaccacgtttctactaaaaatacaaaactaagccaggcgtggtggcacacacctgtagtcccagctgcttgggaggctgaggcagaagaatcgcttgaacccaggaggcagaggttgcagtgagctgagatcacaccactgcactccagcttgggtgacaaagtgagactccatctcaaaaaaaaaagattgattcttaattttttttatgtactcaatcaaggtaattacatgtgcgctcaaatttaatggcaatcaaccaagtattaaaacactagttcaagtacccgagatttccatctgagcccggttggaaacttctgtgagacatatcaaagaagaatggaagcagattctgcagagctgggcagacctgtatgtgacttagtctattccaagtttgggctgtgtcaccttgagaaagacctatgatcacttcaagcttcagttcatcctctgtaaaatgagaacaataacaaaaagagtactggatgtaatatgtataaagcatttgtcagagaagggacattttgggaactcaagctatggtactgatgatgatcgtggtgccagttgacagcagcagcatctctgggagccactgtgaaaataaatgagcattaatgtcttgggctagagagttgatgagtcaaatggtgcagtttggtaggcttgtctgaactcttcactaaagagaagtcaccaggctgaggtcacctttttaaaagtacttttccatgatgacaaaagaaatttttactgcatatttttaaacatttgaatataaagaggaaaataaaattctcactatcaaaagaaaattgatattaaaattttagtgcatctatgtcaagactttgcatctctacttagaaatacttataaaatataaacctgattgtacatgtgaaattacagtttaattcttcagaaactggccctgacgctagatttcctgtattttcattttagcctcacaatcactgtaggcaatttaccgcagctttctaaatctgagtatttttttttctgtaaattgtagcaaataatagtcccaacttcataagattgctaggtcaattaaatgatgaaatatatggaatgtgcttagaatactttctgacacaacaaaagcattacataaaggttagcaataatgataactataataattaagtgatgataatgatatgtatgtgtttctctgtagaaataaatgcaaaaaggataacaaaagatagcacagcagcattttattttgaacatggactttgatttcatattcaaatatatgaatacttcaatgagtgagtttaaatctatagaaaattacttgattctttcacagtttcagttttgaagtctattctagatttgttttactctacttcaccaatttggtctatgtattcctgaaaccagtaccacatcctttaaaaggtttttttgctttattttgactacttggctaagcacattaattattcagcttttccaaaatatttttggaattaatatcttttcattatcacaaataaattttagaatttttatatcacattttaatctgttttggtatttttttgtaattgcactatcttttagaagtattttgggaggaattataaactttatgatattgtcttttcttgtaaaacctggttcgtgtcttcatttattcagttctcctttgctgtatgtcttaagttgtgtatttttcattttttaaaatagaacttatttcttctttatgtctaggtagttttcatttttattgatactgtgaaggaaatttttttcttctcattttgcttgctaactagttaattttgctgtaaaagaaaacaatggatttgggccaattgattttgtagctataaaaattactaagctctttgacaagtttaacagcttattcatcaatgttcctgaatttctcagatgaacaatcagatcatctacaaataataaaaattggatttcctttttagcaatgattcattcatgattcatatctgctattttaattgtactggttgaaatgtctatttacaaaggtaaattatggcagcaataagaggaatctatattattgtcaattttctaattctacgggaggtactcctagtgctttaccattaagaagaatgaatgtcaacatccttggtttgatgccagtgtttaaaattaattttaaaggagtatccttctaatcctagcctaaagggtttacttttaaaatattttattttatcgaggcattatgctgacatttatcaaatgaatgttgttaaacagtaaaataaccatataattttgtcttctttgtatcactgcacgggagaattatattaatcagtttcttcatattgaaaatggtttacattcctggaatgaaccctagtcaatttgtgttatcattattgtcttttcttacatttgaatcactagcattttaagtaggtatttttcaccattattttaaaacttagtgttactactatatgtgtgtgtgtttaataacattttagaatcagaaatgtgtgcagtgaataaactgtaaggcaccattgccctactttttctctgaaagtttcaacatgaacactgtattgttgtactcaatttattctgtgaattgatcttttcaggatttcaacctctcttgacagtgttttggtcagttgtaattgcctagacaatcatatttgtcatttagattatcaagtttattagctaaacattgcttattattataatttattttaaatctctacttgttattctgctattattttaaagtattctctcttatcttttcaagtaaatcatttctcattataaatattggttaaatttttcacatacagtatgtcatctgtttttcaagaattagcttttgaatatattcttccattttagcccttttaaaatttctgtttctgactttattatttcttgcttctacttttttaagaaaatttttaaataattttctatattgaatgcctctttattgagaagaagacagtcataaaattgcctttgagcacatctttgattacacaacattaatttcagtaggcagttttctcatccccattttctaatgagttatataatttttatttttctgatttgaaatatgttattgattttcatgtttatatgcctaacttttgtagaaatttgtagttttacttcaatctgatgacaaaatatgttctttaaaatttctacttttgaaatttattgatttttttcaaactactttcttaagaccaatttatatgtttgtaaaaaatatatatccttagctttagagagaaaaaactcattaactattaattaaattatctaagtaaatgtattcaaatcctctattcagaattattattaattgatctgagaaaaaattgactagtatatgaaaatcactaaattgttttgttattttcttatagttctaatagtttcgctttatatatttttaatctgtattagaccatcatattcttattgggaaagatgtcttttctcaatgattagttataattgtatcagattcctttgatcttaataaatatatttcactttaaattttttctgttattaatattgtttcccttgcttgcttgttgttgatttacattttcttaacatatttttccatatttgtattcttagtcattctttaagaagcttttatttccacattggatctcctattaacaagatacagttagtatcccacactcttaaagggattagtgtctgtatccagaataactaaaaatatccaatatgggaaggactctttggaggctcacgctaagcagtgtatttatcaacaatttaatactggatatctcttataaacctgaaaacaaatcaacatttaattttactttctgaaattaatattgtgttatggtaccttatatcctaaatattttaaatttctattggcttatctttctatcaatgaacaacattaagatgatctggctagctctgctttgagtggtgctaggctggcagggcagtaaattttgagctcttcctgctgtccctttggcagcctagggtctctgagctgtcatctgtctctaaggaaggccagggcctctcctcctccccagctgggcaaaaagggaaatgatattatctgaactagtcggaaactagaccggcagtcttctttcttggcactgctttccttccttagaagagaggattgatatctgagcctaggaggaaatgttggaagaaatgatatcaaatagctttagaaagtagcatattctaatctcacaggaagttttatcttgggtgaattacttaacatctttgtatcatattattttcatgtgtaaaataggtataataaggtctacttaataggatttttggaggtcttatgtgtgaaaatctatcaaatttaatatggtgacaagcaattcatcagctatagataggtgttgtcatcctttatataatgtgtttatgttttgttcatcttaccttctaatggttttctcattttgactgtagaaattctttctcccttgctttcttttcttcctttcttttgtccttttgtttctctattttctttttttcttttttttgttgagatggagtcttgctctgttgcccaggccagagtgcagtggcgtgatctcggctcattgcaacttccgcctcccaggttcaagcaattctcctgcctcagcctcccaagtagctgggactacaggtgcacaccaccatgcccagctaattttagtatttttagtagacacggggtttcaccatgttggccaggatggtctcgatctcttgacctcataatccacctgcctcggcctccctgtttctctatttttaaatgaatctttcgttagttcagaggaaagagctaagatttacaacgtcagaaaaaaattttaaaaaagaaatatgtatttcaatcacacccacaaactcacagctatacacacactcacatgttctcatactcaacataaccaaaatagcatttctatggcttggggtcgatgcaaatctaagttcacttctaagcttaatcactttacatctatacaatcattcgctattttttaatcctatgaaaaatgcaaatgtgtccataatctcaactctgtaattatagctctgcaggttaactgctctgagtctgagtttcctcatttgaaaaactggggtactaataacacctatttcacatagatgatgtgaaaattaaataagcaataagtagaaaattagctgttatccagaggaagatcaacaaatgatggctgttgttaaaaaaataaaaagcaaagagagtaattctttttttaataaagctttaatgaggcttaagtgacctactatgtgtaagaggctttgcaccgagtaggaactcaacaacatttaattcctgcactccctttcttccttctttgcttagtgaaaaaaagaaagttgatggacacactcattgtggataatttatactattttctgaagcagagtagactcagtcatttcttttatccagtgctagtaataatgtttggcagaaaaagtctcactcaaaaatgaaagaggtaactgactcaactaaagacgtggcatgcaaaatcctgttggtgtcaatccagctaacatttctcccccaatggtggatgcctagaatttcacagtctcttctctacttttgattttggtacctcttaaaccattactgctcctacaaatacttctgagtaagtatccataccttccctggagtatgagagtgaaatagatttataagtagatttttagaattaatgtttagggatttgcatgagggaaggaagagaggaggaaaggaatgcttgtggctgctgaatttcagaaggaaatggaagtagaatctacaaaaagggaagggaaacatattgaagacaaaaaaacagtttcctactgcataaattttcctggattttatccttaatccgaatgcataaggaacatctaccatgcatttgagatgtctgagtgggtctcatccaagggaaagaagcatgtactttcttaatggtttctttgttgctactttagccttacaaactggtgactcaaaaatggactgctctagctcttcaactcttttcttatctagctaaagattttagggtatattctgttaaatctatttcaggaaagatgggaccaaaatacatgtttggtatcaaagttctaaaatggaaggtgaaattactcatgtttgactatgaatttcatggagttgctccccaataactggaggaaaaaagaaaaaaagatgagagacattcactttatttaagaaaaaaatccactcttccatttaaacaattacccctaaaagacaacaaaagaatgtattttgggtgatttttctttaggacatgcccacacattttatcatgatacatgtactattccagaagggcggggagagtgggactgttgaaagtccatgtaaagaaatcataatgtgaagcaagcaacaagagagaaaacccttcttatggtttcacatctatacatcaattgctacgattttttttaagttttagtgtaagatatttaagttcatgtttgcatatcagtgtgcagcgtagaaacatacatatttctccgggctcaaccacacatgtggcaatgtctctccagcagcagactcctctcacagtaagtctaaggagcgttggccgaatgagacttcacattcagtgaatttccactatctcttcagtttctccgtgctactgaaatctcattgttccactcagaatttatcttctcctaggaatctctttcaaagcatttcactgactatgtcaagccagagtaagtaaaacgctgatgagcttggatttccactccagtctctcagcctttctgtcttatagtttggcatctcatttctacatgatatcagatgccatattagaaattcctgcttgatcttgagatacatcaaaggtactgactgacaggtcattaggtacagcttaaattcagtctttaatcactaccacttttaaaacatttaatagtgtaattaggaaaaattcataaagacttgaaaacttcacatcataataaatccagattttagtgaggctgtcagatgttgttacctcactctcaataccagtaccagaaggatgagaccgattctccacatattcagaaatcatattctagatgaagatatgagctaaatgccctattctggtctattcttttcatgtttgtgtgttcccttctctgtttattgaaagatgtcactgaatttaaaaaatgataagattcaaagttctcacttaaaagtaaggatacaaaatgtcttaatcagggagaaaattttgggaaagaagaatacttttttgtatcaaaagattaaaagttcttttcaaaaatgctattaaatatgaactaataccacatttgacttattatactgaaactaaatcatcaaatcatcaagcacccaacattttgcacttataaatttaagatgtcccagataaggaggctatgaagaaaagacaacactgggaaatatttatttttcaattagtaagttttctcaacaggctgttctatataccaagaattttatttcagtgggaaagaggccatagttatttttatttcattatcaaatcatagcatgatcaataaaacatatagattgcatattaaatacaaatctgctgataatattgactatgcaactatgatctttttcctggagggtgaaaaaggttcagagtgcatgctatccaatataatcatgtgtttggtatcatatgcttcttatgccttcaacaaatctctaattttacattaaaatagatgttgggttttatgctcctgcaaggagaaaacctgaattcacaagcagagccatatgacaggagatacattcaaaatattttgcaaatagaatatgccagagttagcacaaaagtctgctttgggggaaacttctattatgaataaaattgttgtttgtcacttttattttaccaagaggcaaattagtcattgcatagcctgttctatttttttcttgaaatcaggtcacttaatcccttctgggatgtactcagaatgagagcctatattttcctctcagattaatctggagagaatttcaagttgcaggtcttcatataatagggcatatggaaatggagtctaaagtgtctgacactttaaatgatataactttattcaaaatggcattacttgtgaatatgatttaaataaaaatgtaggtgaattaatccccacatgacctccactgcagtaaaattatattcctgcaatgtgctttgtatctcctatatcctgaatacagccggtaacctcaaaatgccagcatttgtgaatggaaacctatttctgagcacaatgtattatttcttcctaggatgtaacagttattattcatttttcttggacaaggattcatgttgaataatatgtataaagttagaactagctaaatgcagggaattcaaaagtgcaggtgaacagtcaattctttattcacatgcctggctttcttcatgtttctaactattgtggcacactctgaggatgaaaggtgaggttgtttcagttccatgacttaaaagctgaacaactactgcataattattcgactgatattatctgtaagagaaatctgcaagatataagatttcttgttttcataaagagtcaaaatatggatttgaattcttattagaaccctaactacataggaaaaagatacagagaaaaataagcctagaagtagataaatagatatacagagcaataattagcaaatgctctatagtgaagaatcaattcattatatttttaacttccaatctgtcaaggatggatacttttgtaaaaataaaataaaaatgattaatagaacatgaaataaaaaaataagcaaagggatacaaaagacaggcccagatttttattatttgtttaaagagtcacagaaattacattgcaatgaatatgattataaaaaagcataacagaaaaactgctataaaagtttccaactgctcgcttgcaactcctgtacttttttcatcacagatgggcactagtccacggacctcactttgagaaacatcgagatagaacatatattcttggtttttccttctccatatttattaggtatttggtacatatctcagcatttctaaactgtatgctagcagcagcactttaggaaaacaagtatttctttttctatgcctgcctcttcatccctgagtttgtagctggggatgatatcaggaggctggcaaaggtattctgctacaggaaaaaaaaaaagtaagacggttcctatcctaaagaagcataacccagtagaaaagaaaaacatcattaacttgctaatgtagtgtcttctcatagtggtcatggatgagtggcatatcataaacttatttcaaggtgagtttccttatgtacaccacgtagtgtcagtagacagaaaaaatattctatgtatatggattctcccacatttccaataaatgatgtcgctgtgattaataaaatatttgttcatttttaactggtacctaaattgatagtaactatttgtcaatatgtatacattctgtgaataaattctagagatgcagctacagttgtagagggtggcattcagaaggggaaaccctggccaggcgccatagctcacacctgttatcccagcactttaggaggcccaggcgggcaaatcacgaggtcaggagttcgaaacctgcctagccaacatagtgaaaacacctgtctactaaaagtacacaacgttagctgggtgtggtggcgggcacctgtaatcccagctacttgggaggctgaggcaggagaatcacttgaacctgggaggcggaggttgcagtgagccgagatcacaccattgcactccagcctgggcaataatgcaaaactccaaaaaagaaaaaaaaaaaaggaaagaaagaaagagagagagagagaaaggaaggaaggacagaaggaaggaaggaaggaagaaaggaaggaaggaaggaaggaagaaaggaaggaaggaaggaaggaaggaaaagaaaagaaaagaaaagaggaagccccaacaagagcttgtagagaagatggagcaacaaggagagctgaagtggctggagaaggcaatgggtagaatagaaatttgagtttgcaatgaaaggatgggtataactttttttcataggagtctctctagatgaagggactaacagaagtcagaatataatgctataaaaaaaactctcccattgaaaacaaaatagattgtggagttgagttggttgagaagaaaacatgtaacttgactgtgggcaacttggaacactacttagggtgaacttatcgggccagaaagaacaaaaacatttcaatgtaaaagttggaatctctgattgacaagtagtaaattcctaatgctcaatgttgagaataactctgaagttgtcccacactcaaagaggaaaagcattgtcattgactactcatatctgccatggcacctgctagagaagcaatggtagatgtttattattttgaccacagaaccatggtttctgagcttggctaagagttaaagaaaatagatgcgtttttaaaaattcagctctgtgcagcgtttaaaagctggtctatatagtggagggaaattaaagattttggggtaaagtgaggtataagatggaaagctgtgcagtaggcacagaagggacaggagcccagaacatgagctgatgaaggattgtaacaaaataccttcacaataaaaccaaaacctcatttctgaaacatttcaaaaagtcatagactattagagctgaaaattaaacttaaaatatcactacccagctctttcatttagaaaatgtggaaacagagacacatagaagttaagtctctagcccaaaatatctgtcggcaacttgaagaacagaaagagaaccacagtctcctgtttcccagcgtttccactctccatttcctatgtcaatagaatttagctaaccagtcaatgtgggaatcaagattgaagaatcacagataattcccagattttgagactcaattactgaaaaaacaatacattaactgtcagtataaatcttttattttaactctgatgacgaaatatttgtcaataaaattagccattgaaacataatgctttgatgagtagaggtgtttcaccctcagttaaactacatggtttattcatcaggatagactgagttgggctgcagcaacaaagatctctaaaaatctcagcaacttaacacaagaaaagcttatttcttgttttcacaaagtgcacttattgatccaagaaactatcaaggccatctgtcctacaggtgttaactcaagattccagcttcttattctggcaattaaatgctcctacccagcaatgacacacattacatcactgacatttctctggctaaggcaagtcacgtggccatgacaacttcaagggagagtgaggtacaatcctcctgtgtgtgtgcaaaacgagatgcttctgaacagtcagaatgtggccaccaataacacatgcaataagatttaaagaaaatagattgtgccccaatttgatatttgactaatatctaatatatgaatgtgttctgcttacttttttgggccagaagtctggtgtgagtttcatgcaatccctgaagggattctagttcacaagtatgtaaataatcagtaaagctgtatttttctacttctccatatggtacatagctcaaagggaaatgctgtaaaggaaaagcaagttttaggtcaagatgaggatacattttatgacaacattatgccaagtaacaaacataaatttaaaagacacccattttaacaaaataaaattctaatttacctatgaagtagaaacataaaaatgtattacgattttacaagttaggaaagaagacattataatatctagctagatatacatgtgtatgtcttttttgttattcaaaagctcgtgtttgtaaattatgttcctgaagaatttttaagggattcctcaaaattagtcagaagtactatgtctacatcatctctattaagtcttagccataacctgacaggtcaattttgaaaaaaaaaaaaaaaagaaaagaaaagaaaatgaaaaaataaaagacgtgaagctggaattcccaaaccccaaatactggttgggtagccaccacagcaatgcaaattattaaaaattgagaagtcttgatgatcataagttatttgttgccatggttcccaagggccacgctgtattttctagacagctaatggaccatagtgatacatcctcaattcttgatcttcatgtctcaaaaatgttagaaaccatgttatgttaagagaaatgccaagaggaaaaattgttgcttcgttttttatgcagactctaaatgagggtgatgtttggtgacttttatgccctgaagtcagttctctctgggggtcaatgtgagaagcagaaaagggcccctccctgatcttcatttgcctatgagggttgctcctctgcaggcagggaatgacatctttccacatgttgccacctcactggcttatagcatgtcagaaaggagcctgcagggtacctgagccactttcttgtagaatgttttggacacaaatgttgtggatgtacaacttgagttccaatgccaacttgtttttcaaaggggctctgccaaagtctactccctccatcgatgtctgagagtccctttgttctatgaagtgcaaacaagggcagctgacctagcagtgaatacatcaaacctgctgaaaaagtatttgctggggaaactcacagagatgcggtctgtagtagatgttcctccatcacactctggggcagcacatgcaaaactaacctggcccaaagtcagtttctgggagaaggatcccacatcttggtcttagggggggttttaacattcattactgggaagcatcagtctctcccctcatatgatgagaggctccaacacgacacaaataagatgtggcagaatcttggccccagccctctcctttcagctcattgtgtatagctggggtatagcaggtgtccctcccctggcatgatttgaggactacagtccaagccatcaattgatcccttatatgctacactagagccagtttccatggagcttgaaggagaccggtttctttttgggaaggccagtcttgagagtaccagtattggaaaaatcagcctttccctctcactccacatctctttctttttggtattattttgttattaatctctaacctaattggctaaattaaataagtaagtggtcattagtctgaggctttgtactttgagttcctatgttaaaaataaaaacttcaccctaacttggcacgtaaacaaaccaaaacctggtaagagtattttttttaaaaaacaaatagcctggtttcagccaatcacaaacagccatgatttagccaatcacaggcagccagctgatgagaccttgcacaaataaggccaactcctagctgcagccaatcagatgatttctctacaatgcttccctattcagcctccctctgctcaggctgccaggtgtagctatttaagcctcttctggcgctaagtgctgcccaattcatgattcatgttttgaagaaataaactctgttaaatttaattcttttaaagtttttctttgaatgattgtactagagtatatggtatgtatgactatacattttttaaagttaagagttttggcctaacatatcattaattttcataaattttctatatattgccagaagcaatgtaactattatatgaaaccttttaattattttgttgaaaacttctttggctttagtcttgcttgactaacctattaactccttagagagctatgttaaacttttctaatagactggtagatttttcagctttctctataacattttataattttttggcttattttaggcctattttgtaagatgcatacaagtttttaacatagctttctggccagtaaaaacttttgtcaatatataaataatcctctttatctcctataatgctttttactttaagttaattttgtctaatatttacatactcctaccaacttatttttaattacttttggatgggtatttgttctatatttctattttcaacttttctgtgacctctattttaggtgattgtcttttagaaaacattccctccccctaccttttttatggacagaaaatattttgaaattttttagtggggaatttagtcctttattgattatgggtgcagataaactcattttttaaatttttctgagaatattttgtacctacttgtatttttgtttgtttggtatgtgtttatttaccctttctcagtgctatttgaactgaggtttattttctccattcatttttaacatctactggcttggaagttctgcatttaatttctatcctgttagggatttcgctaaaaatttaacattcagtcttagcttaagatgcctaaagttgatcagtatcttacctcttcttctgtataacacacaaactttaaaacagctttactcactcattcttctaaattagattctattttccagaattcaggtctctcttgatttttttaatctcacaaattaaatattattattgttatatctattcaacttttgtttagatttaccaaaatggttattattttaattttttttgttttattgtctgctcagacacattctggaattttctttctacctgagtatattccttatatgtgccctaagtaagggtctgctgcttgtaaactctcccagtttttgtctgcgattgtctttatttcccactcatgctttctcaagtcatacttttatagattgacggtatttttagatcttgctccctgactcctgtcttcccctgttgctgcaggaagccagctgtcagtctaataatcattcttctgtaggtgattcttgtctcctttttctatagctaattgtaagatcttctgtcttcagtgtactatgaattcattacaatgtgtctagatcagtttctttttatttacttattttttgagattcattgaaatttttaatctgggactgttttctttaatcgattctagggacatcttaggtattatctttatgaacattcctactcccctttctttttttttaatctctgtttagacatacttagctatatctttcatgtgtcttaacctgtctttcatattttccatttctttgcctctctgcactgcattctaagtaatttcttcagatcttttttccagttcactaagtacctcttcacttgtgtctaatctgctggtaaaatcttccattgcgcagcaaattcatatctgaaactatatgccttagaaatacacaagtgcatgtaggttttgtgtaagtaatgtttcttgcagccttatttgaaataggaaaaagaaaactcacacttctcagtaggaaaatggttcaataaattacacacatctgttctattaaattaatactatatagctacaaagctatctcaaccaaggatgttgctttagctattccaacttggaccaatgccagccatctatacatagtggaagaaggtaggcttctgcatgtgtgtgtatgtgtgtgtgcatgaagaattgtctaaaagcaactattccaaattgatattgtgctgtaagtataaaatccacccagaatttcaaacttatgagaaaaaatgtaaattgtcccattaataattttatattgattacatgttgaaataataatatgttagatatattgggttaaataaaatacattattaaaataaatttcacttatttttactttttcatactgctagtagacatttttaaattacatactataaaagtgttgattttctaagttaatattgtgtttcatatttctataattactatttgcttcattcactggtaagaagaacttgtattctccattgtttgtgacactttcaatactcttatttctctggacatatccttattttctgtttactacctggtaattccagtatcgactgttattgtaggtctcattctgaaatatattgtttctaccgactcactcccatagtgactcatttcttcttgtacttattaacctttagcactttatctatgaatattctgagtttaatttacatttctccaaaacaaatatgcattttcttcccccaggtatgttagactctaccaccctggggccaaattaagacaaatattcatcttaggagtttgtgaagaagtcagataggtaatataatatttttattttttatgaaagtaaaatacgtatgcacaaaaatgtgcacgtattacaatgaaagggaaaaatgaattttcacaaactaagcatatctgtgaagccagtaccgaaaacaagaaacagaaaattataggtacctagatgccccccacacgctctgccgtgtgtgtgtgtgtgtgtgtgtgtgtgtgtgtgtgtgtatatagtttgtttgcttttgttttatttttcttggccctgagcaaaggctgagttcaggaggtgccctccacgtctcctgtatgggtttagctcacctgtcctggggctgggctctgttttctcacctgttggggtcccagatattatccacccacggtcccaggttgtatccactcttctgtctgtgattggccaaattacgcttagggaattagaaatatgtaaatatccccagggcaaacattgtttctagcacttgaatattctccagatttaagcttttctctaattttgggtttagaaaaagtccttgttttcccctaagctcagaaatgtaagacagcaaaaaagagagagagagggaaaaaaggagagagaggagaaatactgattttttaacatttaacccataaatagagacttggttcaacaaattatgaataatgataaaaatgaaaattctacactattaaaaaccttgttattaggatctaatgatatgttaaaatatctatgacattattgaaaagaaagcaacgattcaaacctgtaaagtataatccaattttgtaaaaaatttaaaaagatatgaatttttacatacctacaaaacataaaataaatgaattaaagcattaacagtgattttctcttgggaatggactcacacgttcttttattcatatgcttttccattatttctgcaaggttcacatccttattgtgtaatgcgaacaaaaaacaggaagaattcagaagaaaaaccaggagctagaaaacactttttccacacacctgcactcttagtcacacactcaggctatgtcagtggcatgacagaaactggaaaaaaaaatggaatggctccaataacattcgacaagacaaacctacagccaagcaggcacaacactgctgtgccttctactcatgctgattctcatcaaatggaaaatgcgacttcatccaggaggaaccttttgactcttcccacccagggcttttctttcctgttgcaccattaagctgcctttctctaagcagcgcactgcaggtgtggacagaatataacaaaactcttcataatctttaatttaagattgacaattttttgtccctcagcttgattgactttgtgaaatactggaaagcctgagattcaggcaaggaggcaaaagcaagaatacatttttaccaattcacattgtttgtaaataagttattagaactgtacccttttttcaacctagcatggttgatctgcagtcatctttttgagcagcgatttgaaaacaggaccagtatttaagacctcccttttaggacagacaataatagtaacaatcataatgtgccagtgagaatgcttttatgattctctctctttggcattgttagtagagatacctcaaacagaccagtgccaacagcagcttctgggagcgtgctgggaatgcagactcttgggcctcaccccagacttactgagtcaaaatctccagggatagacggtttaacaacctctccagtgatttgtatgcacactaacattttgaaaccacttgagagcatccaaaaataatgttgaacaatcacagttcaaaccgaaaagaaaagacagttttattcctctgtttattggtctctcctctgggaggaattttgctataaaccctcaccctagtggcaacagttaggtgtggaaactcttaagtgtatcacggagcagaggtcagggcttcatataaacagcctggtccctaactgcttcccttctgcagtcaaccccaggaatggactttttgttcagtgtctcctttcatcctctttgaagagatgcaaatttgaacagacagtgtcgctgttgggaactgttttgtccctgccatcaattgtatgttcctctctgtgattatctggtgagacagtgcaaaaatagggacaaaactaacaggaaaaaatacaaggaaacaggaaactctagcgtacaggagttggccagcataatttatttttttcttatgcatggtcatgctatgtggttttgtaaacttcctttttaaaatcatggttgattgaacatttaagaaaagttttgactggacacggtggctcacgcctgtaatcccagcactttgggatgccaaggcaggtggatcacctgaggtcaggagttcgagaccagcctgaccaacatggagaaatcctgactctactaaaaatacaaaattagccgggtgtggtggcgcatgcctgtaatcccagctactcaggaggctgaggcaggagaattgcttgaacctgggaggcgccattgcactccagtctgggcaacaagagcgaaactctgtctcaaaacaaaataaaattttaaaaataaagaaaagaaaagttttgatagcaagcatataccaaactatgaaaaatatgcaaaaagtctaaatgatgcctttggaatcttcatttacagtagttttactattatactaaggactgacacttttattaatccaacttttgacaaatgccgattacttactatgtgtaaggaaggtttcagagtaacaatttcctctaatcaaaatttatctcatctatttcccatttctttagaactctggattatgataatatattaaattattctataatagtaattgtgtatcaatgatgcctttgtcactttggatcgcttagaacagaataccataaactgggtggcttaagcaacaaacattgatttctcacagttttggaggctgggaagtccaagttcaaggtgccagcagattcagtgtctggtgtgggcccacttcctagtgtgtagatgacagcttctcattatgtcctcacatggtcgagagaaaaatcacttttctcttgtcttgttttataagagcactaatcccattcataagggttccaccctcatgacccaattatttcccaaaggctccacctcctaataccatcccatttggagctagcatttcaacatatgaattttggggggaacacaaatattcagtttataacagatgcttatatcccaaatatttttctccctttctcctgtgtcagtgtgtctattgccacaataatgctatataactaacagccataaaacttcagtggcataatacaatagcatttattactcatctatcaggagcctgctagagatctgccaggtggctctatgtcttttggtagggctatgtgccagttggctacgtattgatctagaccagcttcgactaggacacctgcgcatcttgggtctacttcacgcatccatcacattccagcaggcaaccacaggcacgtcctcatgaaactaaccaaaatacagcaaagagcaaggcctctcaaatcatagactcagaaccaccaccttagcacttctgcttcattctgttggccaaaggcaggcatatagtcaggtttagaggcagagccagataatagttcaaaattacacggcaaagggagtggatgcagagggagtgaaggatcagggtcctgtttgcaaccaatgtaccacaccctctcatccaaaccatcattaagacctgtcagttcaaccttatcacattcatccaattttctctatcttactactgccaccacttcagggcactgttaccgcttgcctgtagcctcccaactgttctgtccacatctaccttgttcactgctccttagattattctcaagacagcattcagaataataactttaaaacaatcttattgttttaaaaaaactgctcttgccactcatttgctgaaatccactcaatggtttcctattgctttcaggataaaggtagaaatcctccatatggagtatatggccttgtcccatgtggatgtggagcatgcctctctccccagccttatttagcccccttctcctctccgggctcaaactatcctggccttccttcactctcccagtgccatgctccccacctcacaaggcctgcgtagatatgggttcctctatctcaaataagtctttgcctggttcaattccatgcatccatcagatcattattcaaacatcattttctcaacctcatcatcccactgtcactataatagggtgtcctagtttcatgctctaaaatctgtttgtaattttccatcactgtccttagtttgtaatgaacaattatctgtgttgttaattgattacatctaccccccactaaactgtaaaactccatgatgtcatgtctgcaagatcaatgtggtttcctaaaggatttaccaaactacaaaagaaaaataaattgtactttccttctttttgaatataaatttcttatatcttgaatttaaattagtttgtgcaattacactatgtaactgagctccttaaaaagggcattataaataagatactgcaaaatatcaatcattcttccactttccaaatttaccagtaaaatctttaatcttctctctactttgcacaaatatttcttgcccaggggaataaaaccataaaccagattagtcagattgatagtaaaattactcttaaagagtttgtgttatttcttggtcatttctttaatgatttctgatattctctgtagggagaatgcctaaattaaagactgtgagacacaggtgtgaagcaagtgttggatttgtgttctgacaatggagaagcactatctacatgttcaaaataaatagtatttccttccattacaaaaatgtaaattataataaacctgtaagaacatatgcatgcaataatatttaacagtgatttggtttgtaccgtttgaccaaaatctccccacttcctccacctccagcccctggcaggctctattctactctgtttctatgagtttgactttttagattccacatataaatgatattttatagtatttgtctttatttgtctgacttgacttcacttagcataacatccccagtgttcatcatgttgtcacaactggcaggatttttttttttttttggatacacaattttgctctgttatccaggctggagtgcagtggcacaatcatggctcactgcggctttggcctctcaggctcaagcaatcctcccaactcagcctcctgagtagctgggactacaggcctgtgccaccacaccaggataacttttgtattttttatagagacagggtttcactctgttggccaggctggtcttgaacacctgggctcaagtgattcgcccacctctgcatcccaaagtgctgagattacaggcatgagttaccacgtccagccaggaatttcctttttttttagattgaataacactccattttgtgtatatgtatgtgtgtttctatatatatttaatatgcctatatatacacatttttcttgtccattcattcattgacagacacttaagtggtttccatgtcttagttattgtgcataatgctataaaaacattactagagtgtggatatctcaggggtaacagatttcatttccttcatttccttcagatacatatgcagaagatatcgtagttagatttttaaagtttcgaagaacctccatactctttcccataatggctataccaatttatattcccttcaacagtgcacaggattccttttctccacaacctcaccaacacttatctttttctttttagataacagacatggtagcatatgtgaggtaatatttcattctgattttgatttgcatttccctgatgattagtgatgctgggcacccttccaattacctgtttgtcacagtctgtcttcttttgaaaaatttttattcagactctttgcccatttttaaaattgggttatttgtgggggttttcttcactattaagatatatgagtttttttatacattttgggtattagttccttataagatagatggtttgcaaatattttctcccattctgtaggtcgtcttttcattttattgaatgtttcctttgttttacagaagctttttactttgatgtagttggacttgtttatttttgcttttgttgcttgtactttgggtgtcatatccaaaaataattattaccgagacttctgtcaagcagtctttctcctgtttccttctaagagttttggagtttcaggtcttacgttaaagtttttaatacactttgcattgattattttgtgtagtgtaagataagagtccgatttcattcttctacatgtggatatccaggtttcagtatggtttattgaagaaactattctttctccattgtgtattcttggcacccttgtcaaatattagttgataactatgtatgcatgggtttatttatttctgtgctcattattctgttccattaattaatgtgtctgtttttatgacagtaccatactcctttgattactatatttctgtaatatagtttgaaatcagaaaatatgaagccttcagctttgttctttctcagaattgttttggttgttctgggtcttttatggttccattgaattttagaattattttttgtatttctgtgaaaaatgtcattgaaattttgtcaaggattgtgttgaatctatagatcattttggataatatggacattttaataatgctgatccttctgatctgtgaaaatgtaatatctttccatttacttgtgtcttcttcaatttctttcaacacctatggttttcagtatattgatttctcacttccttaaatttattcttaagtattttcttctttttgatgcttgtcttacttcattttgtgctgccaaaacagagtaccacagactgggtaatatatgatgaaaataaattgtaggcttatgattctgaaggctggcaagtccaagatcaagggactggatctggtaaaaagcattctttctgtgtcatcccatggcagaagggcaaatagagggtgcgtgtgtgagagaaagagaaaaggtgctgaattcattcttttataagaaacccacgcctgtgataactaatccaattcacgagggcaaagctctcactggcctgttcacctctctaggccccatttcccaacactattgcgtttgggattaagtttccaaaacatgctttttgggggacacatttaaaccacagcaatgctattataaatggaatttttaaaaaattatatttcagatagtttatcactattgtatagaattgtaattgatttttgtatgtctactttctatagtgtaactttactaatttgttagttctaacagttttctggtgtagtttttagggtcttctatatataagatcatgtcatctgcaaacagacaattttatgactctctttctgatttggatgcttttaatttcgttccttgcctacctgttccggccaggacttccagtactatgttgaatagaagtggttaaagtaggcattcttgtcttagtcttgatcatacagaaaaacttttcaggttttcaccattaagtatgatatcagttgtgaggctataacctttattatgttgagatacattcctcccatattcaatttactaagagttcttatcatgaaaagatgctgaatttcttcaaatacttctcctgcatctcttaagatggttatatgatttttattctgctatttattcatcctgttaaagtgatgtactgcattaactgatttgtgtatgttaaaccatcttacagccctgggataaatcccacttcatcatggtatataatccttttaatgtgctgtagaatttggtttactagtatttgttgaggatatttgcctctatgttcatcagggaaattagcctgtaattttcttttcttgtagtgtttttctctggctttggtatcacggtaatgctagcctcataaaattagtttggaactattctctcctcctcagcgttttggaagagtttgaggattggcattaattgtttaaatgtttggtagaattcacagtgatgccatctggtcctaggatttttttgttgttggaggatttgactactgattcaatgttcttacttgttttttcttttttttttttttttttttttttggttttggttttttgttttgtttttgagactgagtctcgctctatcactgaggctggagtgcagtggtacgatcttggctcactgcaacctccacctcccaggttaaagtgattctcgtgcctcagactcttaagtagctgggattgcaggtgcccaccaccatgcctggctaatttttgtatttttacatgttattggttcattcagatgtcctgtttatttattatttagtcttggtaggttgtatatttctagtactttatctatttcttccagattatccaatttgttggcatataattgttcataatggtttcttattatcctcggtatatattctggggatctaatgtacaacacagtgattataattaacaatattgtattgtgtacttgaatttgctaagaaagtagattataaatgttctcaccacaaaaaagtaacaatgtgagatgacagatgtgttaactaacttgattgtggaaattatttcataatacatatgtatatcaaatcacgatactgtacaccttaaatttatgcagttttgccaacaataccttaagaaaactgaaaaaagcaacagagatttgatatgatcaaattttaaatattttagaaatttggttgatgtatttctatgtgttgatctaatgaaaatctaatagattgttctagaaaagtcactccttacattcatttttttttctttttttatttattatactttaagttctagggtacatgtgtgcaacgtgcaggtttgttatatatgtatacatgtgccatgttagtgtgctgcacccataaactcgtcatttacattaggtatttctcctaatgctatccctcccccctccccccacccaacaacaggccccagtgtgtgatgttccccaccctgtgtccaaatgttctcattgttcaattcccacctatgagtgagaacatgtggtgcgtggttttctgtccttgcgatagtttgctcagaatgatggcttccagcttcatccatgtccttacaaaggacatgaactcatccttttttatggctgcatagtattccatggtgtatatgtgccacattttcttaatccagtctatcattgatggacatctgggttggttccaagtctttgctattgtgaatagtgccacaataaacattcgtgtgcatgtgtctttacagcagcatgatttataatcctttgggtatatacccagtaatgggatggctgggtcaaatggtatttctagttctagatccctgaggaatcgccacactgacttccacaatggttgaactagtttacagtcccaccaacagtgtaaaagtgttcctatttctccacatcccctccagcacctgttgtttcctgactttttaatgatcaccattctaactggtgtgagatggtatctcattgtggctttgatttgcatttctctgatggccagtgatgatgagcattttttcatgtgtctgttggctgcataaatgtcttcttttgagaagtgtctgttcatatcctttgcccactttttgatagggttgtttgttttttcttataaatctgtttaagttctttgtagattcttaatattagccctttgtcagatgggtagaaaatttgtaaaaattttctcccattctgtaggtcgcctgttcactctgatggtagtttcttttgctgtgcagaagctctttactttaattagatcccatttgtcagttttggcttttgttgccattgcctttggtgttttagacatgaagtccttgcccatgcctatgtcctgaatggtattgcctaggttttttcctagggtttttatggctttaagtctaatatttaagtctttaatccatcttgaattaatttttgtataaggtgtaaggaagggatccagtttcggctttctacatatggctagccagttttcccagcaccatttattaaatagggaatctaggtattgatgggacgtatctcaaaataataagagctatttatgacaaacccacagccaatatcatactgaatgggcaaaaactggaagcattccctttgaaaactggcacaagagagggatgccttctttcactactcctattcaacatagtgttggaagttctggccacagcaatcaggcaggagaaagaaataaagggtattcaattaggaaaggaggaagtcaaattgtccctgtttgtagatgacatgattgcatatttagaaaaccccatcatctcagcccaaaatctccttaagctgataagccacttcagcaaagtctcaggatacaaaatcaatgtgcaaaaatcacaagcattcctatacaccaacaacagacagagagccaaatcattagtgaactcccattcataattgcttcaaacagaataaaatacataggaatccaacttacaaaggatgtgaaggacctcttcaaggaaaactacaaaccactgctcaatgaaataaaagaggacacaaacaaatggaagaacattccatgctcatggataggaagaaacaataccgtgaaaatggccatactgcccaaggtaatttatagattcaatgccatccccatcaagctaccaatgactttcttcacagaattggaaaaaactactttaaagttcatatggaaccaaaaaacagcccacattgccaagacaatcctaagccaaaagaacaaagctggaggcatcatgctacctgacttcaaactatactacaagcctacagtaaccacaacagcatggtactggtaccaaaacagagaaatagaccaatggaacagaacagagccctcagaaataataccacacatctacaaccatctgatctttgacaaacctggcaaaaactccttacattcatgaaccatttcccctcagcccatgatttattgtttatgaacctgttctcagacaggtccagaggggcagccctagagaacatggcagcactccctgtcatggatggtttgacccagtttgcacttctaatttgaagtggaccaaccagagttctcctcctggcagtttgtaattaggacacaaaaagattaagttccatgcaactggaatgtcaggtaaattccagggctgaatctctctgtaggggctaatgggcaatcagaggaaggcagtctttgaaaaggaagaaaagaaaataaaagatgtgtacagaggaaccaggaaattcttgtggtgggagaggtaaggtgaagtagaaagtgtgctggaggaagcaagatatcctgggttcctgatgccactgatctccaagtccatgactggcaaagctcggctgtattttctgtcatgcattctgagagaatttcttgaatccatggaataaattcacttacttatgcagtgagtttctatttttacaagaaaatagttactggccaacacagagatcttcaagaaaagtaatatgccagtaagtgtgctcaggctcagggcatgttgccttttcctgagttcactatggagtctgggttccttctttctgcagatggcctaatgtaattccaactttatctggccctttacttactatgtgcctttagagtagagtataaccttaaaaaggtgtctcagaataatacactctgagtgcccgaagaaaaccttgaaggaattctttcattctggctgtgcatcagagccacttgtgaaatttattagcacatagaagttggagccgtcaccctgcttcagttagtctgtaatagaaacagaacaggttgattgatatccacagataattatagtgcacagcctcagttaaaaccactgtgccttagatatcaatcactacccttcccttaaaggcaaaataactgaggtcattatcagttaactcttgctgttgacaaacaaccccacaactcaatggcttaaaataataagaattattactcatgagcttatgggccacctgggcagcttttctggtcttggttggatccatgcattcatatcgggtcagttatagtttggatatttttccccgcccaaatctcatattgaattgtaatctccagtataagaggtggggcttggtgggagatgactggatcgtgaggctgagtttctttttattttatttttttgagatgaagtctcattctgttgcccaggctggagtgcagtggcatgatcttggctcactgcaacctccgcctcccaggttcaaacaattctcctgcctcagccccccgaatagctgggactacaggcacgagccaccacgcccagcaaactttttatttatttatttttttatttttagtacaggtagggtttcaccgtattagccaggatggtctcgatctcctgaccttgtgatcctcccgcctcagcctcccaaagtgctgggattacagacaggagccactgcgcccagcccgtgaggctggatttctagcgaatgatttagtaccgtcccgttagtgctgtcatttaaaaatgtgtggtaactccccctacccctgccttcctctcattctcaccatgtgagatgcctactcccctttcaccttccaccatgattgtaagcttcctaagacctcccaagaagccgagtagatgccagtaccatgcttcctataaagcctgcagaaccgtgagccaactgaacctcttttttaaaataaattactcagtctcaggtatttctttataatagtgcaagaatggcctcatacagggtcacataggcactctgctgtcatagctgcactctctgacatgtttgaggtcagtaggttggctggtctagaatggtctgagacaactgtgttctctcgatgtcagtttttacactccagcaggcagctcaggattacaagatgtgtgcaaagcttcttgaggataagttcagaattggagcatcacatccactgaattctattgctcatagccggtcatgaggccaacctagattccaggagtggggggaaatagactttattttgggatgggaggagctgcacagtcttacaaataatgtgaatacagagaaggagggaataattatggcaagtccttgaaatcaatctgccagaggcccagaaagagttaagaacagcccaaaggagcaaagaaacaaattccctatagttagttgagtgttttcctaccaccaacacttaagatccctttcacatgtataaatgtgggctcttctttacagcttcccccggacaaatacttgagtgttctaatggcaaaggttgcttcagttctcttttttttttttgaggctccctgtcagctcgcgccagctagcactgcctgaagagcgtcactaactgccaggtggcttagaaggactcagcacacaaagccaagaatgcttctcaaattcagcctaaatgactcagtcacctccattaggatgaatgcatctcggaatagtgcaaattatgaagatttcattctgctttcaaatgcaattcctgggagtgattactgtgtctactaagcagccaactaagctcacggcagcaaaggcagaactggacgcaaatcaagtgaaaactagatgcaggtagttggtcgaagtggcaaaaacaagaagacagtggcaaaatcaaatggaataagaaggtgtttacatgacagccctgcctctgggaaatagtgtggaatgagaaaaggcccagagttaacattccacatctttttacatggatgttactatagcacttgctgcttcttgcatctcacatcctatatcatagaaatgcaattatatcttaagcagaaccagcaactattagcctgcctccctcagagcaggaatttgtaactttggctgcccagaagaataacctgggatgctttgaaaatactgacgcctaggcccagcatgagtgattctaacttaaatcactccagtgtgtgacttgagcattgggacttttttaaaaattaaaaactccctgattgattttaatatatgcctaagggtgaagacttaactaggtgcctgggtaactcttaattcatgcaactaatacattcttttgagcatttattgtgtgcagagaattttgccagatgcagtgttcaacaagaagttgaccttttggcgcaaaggagaaaaaagatgcctatgcagttgaagtcaccacgggttgagccaccataaagacaaatctagtgtgaaaaaagaaatggcacagaggaggggataattctccacctgttgctaatgccccaatttaagaattatccacagacttccacagatcaatcagccacaggttagattaatgaatcactctggacccagcgcctagaatcccaggtataaaccctcattcaagctcatatcatctgagtagcccaggatacagaactgaagtcctcaaagtttccatttctcagttataaaataagagcaattgtctcccctcatatagttgccatgaggtttacacaacataatttgaatgaagcagtaggcacaatgcctgatacatagtagatgttcagtagagattaaggagcagctggtaatttgtcataattaagaatagaataacaacagtaatatctgattcttgaaccctgtcatgagtacatttccttgtccagaggagaggaaaaaaaattaaatcctcaaagatagcagacgtgagaggtaagacaggaacaggagagagaagagggaaaaaaacatagaatttaagtaaggatcagtgaagagatattttgcctaatttcagatgtgttgcaagaaatcaaaaagtcctggcaaatccacctccctctgccttgatattgtgtactaaggagaccccacagatcctccttaatgctcggcaagtccctcttcacactccactaaaaactgcctgagagatcaggcacaaaaacatgacagaaacaatccccttgtgccttgttttcctctttactttgattgccaaaaatgtccaggttatcctgcatgtcctgggcactcatccttaactaaccccatttatcctcctatctaacccaatctaatctctttctgatcctctaacccttcctctgtcatctttaacctacacagtgcatcaacagcaaacctccaacagccacgtctttctgaaacaaatcctgttccctatttggctctatttggaaccatgtggtctcctaagactacttctccctgtagccatcgccaggactagctgcaattttaaaattatcactctatttactgctgaatttggaagaatctggaagaatctctactcctcttcacttgcttccaaataattgttctcttctgtcttctccttagacaactgtatcattgaatctctctcgctttttttttttttttttttttgagacagggtcttgctctgtcacccagaatggagtgtagtggttcaatcacactcattgtacccttgacctcccagtctcaagggatcctcccaccttctgagtagctggaactacaggcaaacactaccatgcctggctaatttttaattttcttatagagacgggggtctcaccatgatgcccaggctggtcttgaattcctgggctcaagagatccttctgccttgggctcccaaagtgctaggaatataggtgtgagccacaagtctggtcttttgtgaatcacttgcttaggctacaccatctgctaccccttcttgttgctgccatggacagttctagcagaaatttcttccttcattgaagatgttaacaatctccttacttattgagctccaacgtcgttccagttatcattcctggtcattttgatgccatgcattataacttgcccgtcactcggacctctcagatgtttgctgtgctcgtcctgcacaatcttcccttgcactgcccccccacctcagccatgcatttccatgaccatgccctctgccttgtcattttcttctcaagaccaataactttgccacgtccaaatctcaagtttaagcatcccattctttaaacactacttcctgtcttcccagcttaccccttctaacagccggactccctcactctgtgatgtgacttctaatccattgacactgccacttctttactgtctgtctcctccttcatggctttacttccctcctcctctggcttggagtccattcatcattatgatgacaccctcatactttcatatgtgtgatcattctctcctgtattaatcagaattctgctgaaataatattgcataacaaatacattccagcactttgggatgcgaaggcaggaagatcacttgagcccaggaattcaagaccagtctgggcaacatagtgcgtcttcatctctacaaaaaaaaaaaaaaaaaaaaaaattaaaaaaaatagccaagcatggtgttgcacacctatagtcctagctactcaagaggctgaggcaggaggaccacatgagcccaggaagtcgaggctacagtgagccttaatcatgccatagcagcttggaagacaaaggagaccttgtctcaaaaaaaaaaaaaaaaaaatatatatacacacacacacacacacacacacacacacacacacacacgcatatatcactgtggcggatgagaagaggcatttatttctgaatcatgtatctgcagggcaactgggcagctgtgcatcaatctgcgtgcttggttcaggtctactacacattgcttcattctaggacaggacactgcctggagcaggcttttcttctggtaattacagctcagcagagccatcaaaacatgcaagcatttgtaaagtctctgctcacatcgcatctcctcctattttattggccaaagaaagtcatatgactgggcccttggtcaagaagacaatggttagtggcagatgctacaagtcacatggcaagaggtgtagatgtataatcctatttacaggagaaagtgaaaactggaaacaataatctaatccatgccattttcattctattatttcaccctctccctctattgtaatcatgaaaggaaacttcaagtcctgtttaaattctctgcactgactctcaaaaaatagttgaacatggtaggagaaaaactaccaaatggcctcatcttatattcatgactgctgacctcagtggctacctaagtgatgtccagaaattctgtaattccctcgtcaatctgttcttctttttctttctttttttttttttgagataactattttacacctcctcagtaagctcacttctagctcccagccccttccttcccatcaatgtgtgacttcttatttcaataagaaaaatgaaacaatcaaagggaactccatcttctgtaaaatccaatttaccaatatttctgctcagagcctgtgtgttcagtcccctctattggaagacgctttctttctccttgttccacatggattctggaccttatcactacttgctcatccaagtatttaactcttccaggtgtttgtctcatttctgcatcctcaattttccccctttctattgaattattctcaggatatacaaacattctataatatgttgtaacatatctcggtttcaacaatatttccttcaaccccatatgtccctttaaatacaatatcatttctctttacattgccaaatgcaatggttgactctcattcctaaactcactggatccacaagcaccatttaaatcactggatgactctgtcttccgtaagtcattttctccacgccgattctgggacattgcaatctgctggttttcctgctactttgtggtctcctttcatattagagcccgttcctcctcttcatgttagagtattctagggctcagtttaatgacattatgttttctctaactatggttatttcttaaattatactattcaaccatatagttgtaagcatcatttatgttttgatttctgtcaattttatttgttcagttccacttttaccctaagctgcagtcacatgtaagtatatctcaaaactctaatcttcacaggagtacctactagaaatcataaacataatatgttcaaaacctgctcctccttccattatctcccagatactcagtttagaacccctggagtcattcttgactagtatcattctcttgtaccccatgatctatctacgaatctttttgggctcatcttaaagctatactcagaatcctaccatatcttctgtcttatataccaaaaccaccctacccaatgcactctccttattctcctgcgcaactataatagcctcaactttctccacccacttttgctttgctatagtttattctccgtagaacagccagagttgccttcttaaaatataaattcaattatgtcatattccaagcttccgatggctctgttctagttattgttgttgcataataaagtatcccaaaacctagaagcttaaaacaaccattttattttgctcaaagattctgtaaatcagaaattcagattgagcacagagggaatggcttgtctattttatgatgtcttgggcctcaactggaaaaatgaaaaagcctgggggctggaattactggaggactcattcaccattcacgcacttgagctggaatgacaggacactaggctaacatagccattctaaaatagactagagtatgctccataacaaagcctcattctccaggagaaaaaactgtaccagagccctatctttcccagtaaaatagcaattgctcaactctagcccctctagccttcctgtctcacctaagaggaaaaagaaatttaaaaagactgacaaacacttctggacttcacagtccaagagctcagaactactagaagactgagatttagtgataagattatagagaatgttcactgtctaccacaacagcgctccagcataacagtaaattaaagctgaaagagataaaagacacagatcttactttaaaaggagttcttaggaaaacctaaataccaaagaagagaaaaaaggaaacactaaaagaaaccttaaactacaacaaccattaaactacaccttaaactacaacaaccttaaactgcaacaaccattaaacaaacctcaaacataaaaacatcacactaaagtgttatttaccacataactcaatacattatgttcagtttttaacaaaaaacattttaaaaggcaaacacacacacgcacgcacacacacacacacacacacacacagacacacagtctgaagagataaagtaagcatcagaccaagaatcatatatgacagaaatttctggaagtatcagataaggaatttaaaatcactgattaataagttaattatactttagctatgttaagatcgctaatggaaaaagtagactacataaataaacacgggtaatataagcacagagaggaaaattctaagaaagaataaaaaagaaatgctagaaataaaaaaaattataatagaaatgaagaatgtctttgacagactcatcattagattacacagacaatttaggtgacctagggtttggcagtgaggttctgatataacaccaaaagcatgatccatgaaaaaaacaaaaacaaacacaaacttgataggttgaacgttattaaagtggaaaaaattctgctttgtgaaagatacaagaatgaaaagaaatacttggataaaatatttgcagaacatataagggacttgtattaaaaatatataaagaacttgtaaaactcaacaataagaaagcaaacgacacaatttcaaaatgtgcaaggaatataaacagacatcacaccaaagaagatatagatatgacaaataaacatatggaaagatgctgaacatcatttttattagggaattaaacaacaaattagaacaacaatgatatcatcgtacacctattagaatgtataaaatacagaaaactgatattaccaaatgttgatgagtatgtggagcaacagaaactcttttgctgatggaaatgcaaaatgatactgacactttgacatgcactctggcagtttcttgcaaaactaagcatagtcttattattagatacatcaaatgcactcctatgtatttacccaatttattggaaaacttatgtctaaacaaaaacttatacacaaatatttatagcagttttattcctattttcccaaggctaaaaccaactaaaatacccttcaataggtgaacggataaatagataaactttgatgcacccatgaaacagaatattattcatgaaaagaaataagctaccaaaccagaaaaatacatagaaaaatcttaaatgcatgttaatgagtaaaagaagctagtctgaaaaggctataccttatataattccaatcacgtggtgttctggaaaaggtaaaactacacaatgatataagccaaattgtgttccccgcaacattcagatgttgaagtcctaacccttgtcagaatgtgactggatttagaggcagggtctttaaagaggtaactaaattaaaataagtttattaaagtcagctatcatccaatatgactggtgtcctcataagaagaggagatcaggacacagacatgcacagaggaaacaccatgtgaaggcccagggacaagacagccaactacaagacaaaagagaggcctcagaagaaaccacccctgtcaacaccttgatttcagacttctagcctccagaactgtgagaaagttaatttatgttgttagaagaaagtaccagtctaaggactttattatagaagccccagcaaactaatacagaaagcaaaaaaaaaaaaaaaaaaaaatcagtggctgccagcgttgagagagggagagggataaataagatgaaaagagcaagattttttagagcagttgaaactattctgtatgatactataatagtggattcatgatattatgcatttgtcatacccatggaaattaatagcacaaagactgatatttgatatgtgcaaattttaaatgattatttagaagatcctggaattgcagcaaaagagtacagattgtgacaacacaatataactttattacaaatgtatgaaacaaattcaaacattaggggtggggaaaatggtgctgacctaagtaactttgaaaatgtatagagcctttaaggataaaggcaagagtgactctacaagagaactgcactctagttggtaaacttgttccctaaggagacacaggttaacagttctgccactgctataatttaccctaaaattgaataactaaagtcagtgaatggctgaggtaggtgctcacagataagcaaagggagaaggctaacatgatccctatggtaatagactagagttggagacatcaatatgaactcctgtgtatatttactatcacctgaaatttagatacagatggttacatatagaaatatttacagatatgtgtatattcgatgtttggtatatgtgtatatactttattgctctgtgagctgagagggcctataggaaaggacactacagtagtaacattcatagctagtgcacccccgcccccccgcccctgcacctatcttattttgtagtgctagaaagtaaagaagtacaaaaacaaaaacgccccacaacaacaaaagaaacaacttcacactgataggagtttgtccgatggcaccgccgaaataattttggtaacaaaacaggattggattataccctgatacagtttgggtgttgcccctgttcaaatttcatgtccaaatgcaatcattaatattggagttgggacctggtgggaggtgattggatcaaggaggcaggtttctcatgaatggtttagtaccatcctcttggtactgtcctttcggtagtgggttcttacaagatctggtcttttagaagtgtgtagtactcactcccccttcctcctgccttggccatgtaatgtgtctgctcccccttcaccttccgccatgatggtaagttttctgaggcctctttagaagccaatcagatgccagcatcatgcttccttcacagcctgcagaaccgtgagccaattaaatctcttttctttataagttacctagtctcaggtatttctctgtagcaatgtgagaacagaatactatatacctcaaagtataaaataaattgacatgagtctttaacaatattgttttttatgaaagaataatcttgctgaaaaagctgatgaataccacttcagcctggtgatcaaggtcaatatcagcagtcataaatcatgttgatagtattatatgtaccattgttatgctgaaattatctttctctgtgaccttttattccccaaaacccataacctctgtctaatcctcagaaaaacattagacaaacctcaatgaaaggcatcttacaacatagctgaccaatattcctcaaactgtcaaggtcatcaaaaataaggaagcctgagaaactgtcacagccaagaggagcccgaggagataaaacaactgaatgtaatgtagaatcctgggtgggatcttgaaacagaaaaaggacattaagccaaaactaaggaaagcttgaataaagtataggcatttcagggaataaaaatgtatcaatattggttcattaattttaacaaatgcactatactatttaaggtattaataataaggttaattgtttgggtgagaactctctgtattatctacccaatatttctgtaaaactaaaattagtctaatgagtaaaatctctaaattttttttaaaaagtctgatgtgtattctccaaagaaaatatacaaatagccaatgagtgcgtggaaagtttctcaacatcatttaggcattagggaaatgcaaatcaaaaaccatgatgagataccacagcacacccagtaggatgactgtaaacaaaagataaacaaaaacaagtgttggtgagggtatagagaaagcagagcccttgtgcactgctacgaggaatctaaaatggttcagccactttggaaagcagcttgatagctcctcaaaattttaaacgtgagttaccatatgactcaacaattccattcccaggcatttgcccaagaaattgaaaagatatattcacaaacatatttgtgtaaaaatgttcatagcagccttatttgtaatagccataaaagtgaaaacaacccaatgtctgtaagtgaatagaaaaatgcaatgtggtgtattcactcatacaatggaacattattcagccataaaaaagaagaaagtactgatatatgctgcaatatggatgaatcttgaaagcattatgctaagtgaaagaagccagatacaaaatgccacatattatgtgatcctatttatacaaaacatccagaatatgcaaaccctcaaagaaagaaagtagattagtgatggctgaggagatggggatggggatgggcaggtgatagctaaagtgtactggatttctttttagtgttaacaaaaacgttctggaattaggtagtggtaatggttgcacaagcttgtgaatatattaaaaatcactgaactgtgctttaaatggggaacgtttctggtattgaaattttatcttaattttgaaaactctgatgtacatttgacacttacagctcatctcaatgcggtgctcactatcccctgcagcgcttacattctgtgttaggtaatgcagctctagactcttgctattcagatcagagtgtgttttacaaaccagtagcatcagcgtcacctggaagctggttagaaatgtggaatctcaggccccagctgagacctactgaatcagaatctgcattttaacaagatcctcaggtgactgcgatgcactctcaactttgagaagaccgactgcgataatgtcgctggcggctgacactgctgagaaactctatgactgctcacaaagagaaatcattcttttgttagactaaattatctaccattgtccaatcagcatttcaattcttttccactcacctctcaccccacatgccagaattcaatcttgttatttttccctaattgctccttagacgttggtccactcccgggtgagagtaccagtttgggattgttccaaactcagggtcactgactaaatttaatgacagcctctttgtgactgtaaatctaccagcgacgacagttttgaaaaccatccaactttgcttacccggagttctgtctccagcaggcaggatgctctggaagagcagacactttatccatagtgtagccaactgggttgagcaaactggggccacttgtgggtcagatgttttctgtgtgaatggaaggaatgtgtgctaattttacaaacaattcctgacattccgcatctctcttcttttaataataataataaaaaaaagcagaggtaccgagtaaaaaaccacttctgtttctcaattatattttagtttcacttagaacaaactgtcctgtgttccttcaagggcattcattattcattaaacaccattctatagcagtttaaaatacattttcgtattatatttaccaggaagtgattgtatctcgaaagaactctcaactctagtccttttcctgttactgcagagtaggaaatttcaaacaaacaaaacgtgattggtatttatggtgttgggaagtttccttttttagttgtgtgttctgaactcacgttctttatgtcaccagaacttttgtgtctttttttttaatctgagaaatacagaatattaagactatattaattatagttttcatgaaaaaccttgaaatctaccctgtcctaatccccaatgtgttcctatgtataaaattgaaatatatcatgagtaccataaatatatttattcttcatccatatgcagagagcttcctttatacagtgaactttgctgaatggagtggagaatacagaaatgcatgagacatatgctctgccttccaaaagtatgcagtatactaagaacatgtacataatgtggcagagccgaaaatatgggagaaaattcaaggtatacagaaagtattgttcatgttctatgtgataacagtgaaggaagggcaggtcactctggcatgggagaggaaatggatggttaaaggaactcctgggagaaagttgcttttgagccaaaatttcagggtgggtgagtagaatttagaaaaatggcaaccacgttgagacacagcactctatgaaatgggaaaaacaagtttttaaagagtcatggaaaaagataaataaaatattaatcaacttctgtgctaggaacaattttgataatgtttttccacaggagttattaccagatcagttgtaattgaggaccaaagaagaggaaaacaaaggtgaattgtaagaaataattacttcctactgtaacagttggaaaagaagacaaacttagcaattttaattttaaggaaatattctaccgccaggcacagcggctcatgcctgtaatccagcactttgggaggccaaggcaggtggatcacctgaggtcaggagttcaagatcagcctggccaacatgacaaaaacccatctctactaaaaatacaaaaataagctgggcgtggtgactgacgcctgtaatcccagctactcgggaggccgaggcaggagaatcgcttgaacccgggaagcagaggtcacagtgagccgagatcgtgccattgcatgcagcctgagtgatagaccgagtctccgtctcaaaacaaaacaaaaaaaaaccagtattctaccattgagcaatctgctgaccaattaaatatgatttctcgggttttcatttatgttttgtggtagtctcctgaactctgtagacaataaatattaattaattaaattagtattaagtagctatggctgtaatatatactaataaaacagttatagtttaagagaattgcaaaattgttttttctttgttccttaaagtttaaaaaaattaaaaaggagaagaaaagtattggtgcacagaaaaatttgaaggtacatcttcttatgtgtaaaccatgttcttacaaaagtaaaaatagtaatttagggacatagttgtaatctttaggtaaccattagaatcttttttttcctttttttcttttcttttcttttttctttttttttgagatggagttttgttctgttgctcaggctggagtgcaatggcatgatctcggctcactacaacctccacttcctgggctcaagccattctcctgcctcagcctcccaagtaactaggactacagacatgcaccaccacgcccagctaatttttgtatttttagtagagatggggtttcaccatgttggccaggctggtctcagactcctgacctcaggtgatctgcctgcctcggcctcccaaagtgctaggattacaggcatgagccaccatgcccggccccattagaatcttaataagggtactgatacattcactgaagagctttctagaaatctaaagacccttatacattcaggagaaatgaacttttagctaaggaagaattcaggaactaagataagcaaacacttatttgtatttgtatatgcgtggctgtgatttatatatataaagcaagcatctctttgttttttttcctcaaaaaataatgtattgcaaaaatgttttgattgttttcaaacctccaaatacatttctcttttttcttcatataatgttggacattatttttggcagatgatgctgatagcagaaaatgtttagtttaaccacttgggcagctgtggggtcttttttccttttcttcctcctattaatgaaaaagcagttccttgcagcaaagaatgggagtgaagttagcaattaattgacaatgtaaaaatcttgaataaaaataagtatctgagtaggaagaaaaaatgtcctcaaaaatatatttatgcatctcacatagacatagcctctctgcacctgttttcagaagggaagaattccaggtcatatacaataaacttctcctttcaaattgattgtttctaaatggtagctcaacataacagatcctcacagtctgtatttctttttagcaaaacacaaaactctgtattggttttgttttgcatgtacagtcatagcaacttcagaatatgtgtacatctttcatcccaaaactttcattattaatcataatggttagctctctctcccctcaatcattaaccctgtctggttaatattgttttttgttgaagccattagttattttattaaggtgtgtatggggcagggagcagaggggtgcatcctctctgcttaagtaaatggcaagttcagcaatattttcaaggtcaccctcactatgttcatttggggtaaggattgaagtttttgcatttgtgaaatgctgcatgtgcaaaaagaaatggtgtcagaaaggaaactaccttatttctctaaaactttgatgagtttgaaatgtctgccgttagcagtttgaaagatcttaccaacaaatgaggagttccaggctttactctgaaacgtgcctgcagcacagaacttttatatttatggagcatgacctccaactataaatgatcactcgttttttaaaaagctattttggggtaaatgccaattgcttgagaagtcaggaatacgttaggctctggattcaatattgtgctagcaatagacagggatttcactttcatcgggacagccatcactgttgatcaccaatggaccactcgggctttgtcacaaagtggtgatgacaccaacacattataaccttccaaaaacaatcagaacttgttttatccaaaagaacaatcatatcacttgtattccatgttcttctggaaatggatgaaagagcaaacttcacagttatctaagtggtaaaaatacaactgaagaagtaaagtgtccacaataggatattttaagtccttagggtattacttttttctttaaggtgaaagaatattaaagtttgaaggaagcatcctaattttaaaaattgaagaattacctttgaagggaattgaaacctttgttcaacaaaacacaaagtgttccggagcctgtagaaatcttcagaagaggtgtgcaccagaaatctacctcaattccccagaggcctgcacctcaaagcgaacactgtcatattctgagccggcttcctccaatgttttctttttaatccatatatatgcttacatgtctttttatgaagttgaagagatttattatgatataatcacttccttagcagcttgggactacactgatgagcaagcaagatggaaataggccattagcattttagtccatgggaatgtggactttgtagcaccccatgaagtgtgtattcccattttgtgtaggaacgacaaaatgtcatttgacagagtagaaaatgctaacctaagagggaaaaaatatttgttttaaattttcagatgagttaaggtggttagctcatcctaaaatagaccacctgaggtgtttcatttgaaatttcctaagtaactgattttctattgtgctcttctttagctgctaatcaaataaaagtgatttttccaatgtccttgattgatatgtgatgcagttcttcaatgcttcaaggatgaagttttaccttaaagggaaaggaaaaagaacaacttgataacaggagcaaaagatgtgtgtgtatatgcatgtgtgtgtgtgtccctatgagcacacctgtatgtgtgtgttcacaagcacattctctacttcagtgaactcaatagtataatcatatactggggaaatttttgcttgttatttccctggtcgttcaacttcaaaatattattctgtacagctcccacattgatcaaaaggctgatactcaaactgaaacagggaaagttcattcaacaaatattaagtgcctactgagtgctggtttattataggcacacatgggccatatcagggaccaaaagcagacaaagactctgctctcatgaggttagattctagtggagggaagggtaaaatatttaaaaataataaataatcgtcatcctatattggaagaaggtaagggctatagaaaaaatggaaagtaaagtatgataaagaaatcatttgtttgttcgagttaaggccatttaaatagaaaactcatattttagcaaaaacccaaagaggttgaaaaagggagacatacggatatctcgagaaacagtggcccaggcagagagaaccatccatggaaaggctcttctgcagaagcatgtccagtgtgtttgaggaacagcacaggccagtgaaaagggagtggagagtgagggggaagagccataggagagatatcacagaggtagtgggtttggagcaagtcctgttttgtagggtcttgtaggtcactttaagccttgccttttaccctgaaggaaatgagagccagcagagtgatctgcctaacaagaggattgctctggctgtggtgttgagaatgaactgtatgtagcacagggagggggaccagttaacaggcttttgcaccaacccagacaagggataatggcaactcagaccagagtgatgacagtgcaggtggagagaagtggtcagattctaactatattttgaatgtcaagaaacaaaattgattctctggtggaatcgaggtagggcatgtgagaaaaacagcaatcaagggcgcctccaaggtttttggctgggcagttggaatgataaagttgccatcaaatgagatagagcaggctgcaaaaagggcagctttcagggaaaacaaagggtggagttttagatatgttgcgtttgagatggcttcaacatctgaatagagatactgaccacctggaggcagcaattcagatgtaagacttaatttgtgctcaccagctcagtttaggtagtgaaatgcagagacagacggaagagtgttttagttatctcagccgccaactctcaataaaaattacactaagaaatcgcttgggaaagttaagacaggtttttataccagatctttcatgtacaatctgggataaccttgatcagtttctaacctctgctaaattcagtaatcccattaataaaatggagtatctgaagtcagaatcctaagaaacagagcttgagatggggaattttgtgtgaacaatttgttaaatgtgctctcagaagaaagggagtgaagacagcagaaaacagttaggagaaggtgctaagaagggctgtgtgctttcagctaaagtcaaacttctgcctgatactatgaatagctctggagctagaattacactgcagagttggtcccaccttgagacaaggcaaccaacagcatctcttacacagggctgtaataaataccactgtactgttgtgtaatatttggaggagtattgtgactgtcacacagtaggccttttgtgaaagtttatgaacttccctcactacagctttatgtaaattctaattatttgatgggtttctttctttctctcttcatcaatgaatgatttgctggattgacttctaattacatacagttctattgccattcccttccattagaatttcattatagagataattattcacatattttaaaacatagcccacctcttcagtaatgaagctacaggtatactactctttaacaggcatggcaaaaactaaggctggtaaagtcctctctccaccagttgtgagcaaaacactttcatttcagaatcaagaatctgctgcatatcaaaaatatttcgtttacttatgggaatccttcctctcagtaaaaaaaaaaaaaaaggaaaacacaggtaaagaaaaatggaggaatggattctaaaaccattttatgtttattgctgatctagaaacccaagcatttgtccattatatcagaaaaggactcagtgggacttgctcacagtcaagaagtaatttgacaagtagaatcagccttgattcgtaaaatgtcataatgctgtagatcaatgtactttgcctcttgtccatttgctggggaaacaggagaatgttgtgtgttctggttacctgagcttgagtgcatatcagaaaaagtatttttctgccccaatctttgttgtcaaaaattattttaggccaggtgctgtggatcacacctgtaatgccagcacttggggaggccaagttaggtggattgcctgaactcaggagttcgagaccagcttgggcaaaatggtgaaaccacatctctgccaaaagtgcaaaaaattaacttgggcgcggtggcacacgcttgtggtcctagctactcaggcgtctgaggtgggaggattacttgagcctgggagacagaggttgcagtgagccaagatcatgccactgcactccaacctggttgacagagtcagaacttgtgtccaaaaaaaaaaaaaaaatcattctaaagtcaccctaaagtgtgtgtctttgtatatctgcagatggacacttaaaatactcatactctcagccctaaggtgatccttggtggtgtgtgagccaagcatagccccaacatccagtcacctccagcctcatccgtttaccctgagggccacagagatatcattgcttttgctgtgagccaaagcagctcaaaggaaggaagcaccgagcaagcaatctgagtgaaggagatgtaagagactgggttgaacgtgtcttgacccagtgtcttacattggtttcctcatctgtaaaaatgtaaaagtatctacttctaaaatacaccacaacaaagagaagaaatgtatgctttgtggccaaaatgaaaccaaaaaaccccccagaatatcttgggtaagaggatgagggattgatcatgtaccccagtgttattcattgctataaggtttttcctgtgattaagcagaaaccagctcctgaaaagcattactgaaacaactacaactggaaaatttcctaagcaaatctgatagaccagcttgaagccagtggacaacaaccttgtggtcctgccatagctctagttagacagaggaccagttttataagcactcattattgatgaatggctgcagaccttaagccaatttgagcccctttgtggagactgcacacaaattgtctttgtgccctgtagttcgccttttgacctaaagagctgaattccacctcattttaatactaaaaccccaccccaaagtgaacatagggtgtatgtaacacatatgcttacccagtgagcaaataagtgcctgactttcccagtgaatattcatagaatttctgcaacactgctcaatatgtatgtaagactgtgtaagtgaaactgaggagttaatttgatcaggtctgtgtggcctgcttgcttgtggttgcttgctttttaatacctttttaaaattcctttttccatgaagctgaaggttgcagtagctgaaggccttcctgctgaacacagcaacttaaccttcactggctacgtcatagataacgtgtataggtcaccgtggtacttgtcacttcaattgttatttaggaacttgggccagctcctgtccagttcaaaccaattgaggccatggatccttcaactgggcctgcacaagtgcttgaaaggtggccttttgacatgagagggccaaaagctccaccctcagatcatgctaacttgtccattttctacatgtacatcctgtgaaatgccatgaacctcgactacacttgtgaaaaacaaacctgttatttcatttttccccactgccaatcacttttcccatgccttaggcctccacacttccctaacccataaatatctctgagacttaccttcagagaggcggatttttgagagctgttctcccacctcctttcttggcagtcttgtgaataaatcttctttcttttacaaaacttatgtcacagtaattgatttaccgtgcaccagcaggacagatctgaacctggctggtaacataaggaatatagagcagctcccccctcccccttctgagcccttttggacttccctgaaagcagtgtttccccatcctaggattgtttctccctctgaaaataaagtcttctcctttccttcctccatgatcctcatggtctttagttaacactatccaggacattgctgtgagaactaaatcagtcactatatacaaatcacttagagtgatgatatataagtgtgatgatactgtgacatatatacagttggccccccgtatctgtgggttccacactcatggattcaaacagccctggatagaaaatattccaaaaaatggatggttgcatctgtactgaacatgtacagacttggtttcttgtcatcattctctcaaaaacacagtataacaactatacatagcacttgtattaggtattataaataatctagagatgatttcaagtatacaagaggatgtgcctaagttatatgcaaataccatgccattttatattagactcatgagcatctgtggattttggtatgaaggagggtatcctagaagcaattccccatggatacagagagagatagagacaactgtatttgctcttcatcctagttttctgaaatatagcttccaaaatcctcagaatttccagaataatgaatgtctttttatatgctaatgaggtgactggggacagctggtccccagagagcctcaggatgggggttggtcaccagaaagaccaaggcagccacaccctccaatctcggggaagcagagaggggctgaaggttaagctgatcaccaatggccaatgatttaattaatatgcctacataaagacacttccattcaaaaaaccaacaagactgggttttggggccttccagacagccgaacacgtggaggtccaggagggtggcacccccagagagtgcatggaagcttcatgccccttcccaccttctctgccctgtgcatctcttcatctgtatcctttgtaatatcctttgtgataatctggcaaatgcaagtaagtgttctatgagccatcctagcaaattaatacaactgggagggtcatgggaaccctaacttacatccagttagtcagaagttctggaagctgggaattgcaactgatgtctgaagtgggaggcagtcttgtgggactgagccctatgggatctgacacgatttccaggtagatagcgtcagaattgaattgaattagaggagattcagctgatatctgctgcagaaaagaattgcttgcttggtgtgtagggagaaaccctcatacatttgctcatagaagtgttctgtgttgtgttgtgaaagtttaggagaaactgagtttgctttttcctatatcctaggaataacaattcagtattattcttaccaagtaagaattataacaaacttcttagcatgtaataggaattttatatgggatctgttgtaaaaatggttaacccccagattaaatatttggtgaaagaagatctatatagaagaagaagaagaaatgaaacagcacactactattgaatatttcatactcaataccacattcaatatctttgttaattttttagagataggatctttctatgttgcccaggttggagtgcagtgactattcacagatgagatcattgcactctacagccttgaatgtatggcctcaagtgagcctcctgagtagctgggatgctcaccaccatatttaatattttaaacagcactgggacggagatgttgttgtttccattttacagatatagaaattgaagcgtggagagatgacttcatacgtcttcatacctctcacaaaacagatctctgtacttggctggaaatatgctccacaccatgtaaatataacactgtatgttttcagatcactgactgtcttgtttttgtagggaatgagggaaaacgtacctttggtctgctgtagtttcactgaaaaatcaattgacaaaaggcagactaataggcaaaaatgcatacaaatttattattaatatgcacaagagtcttataaaatatgagatctcaaggaaatggctagatggttgatggttttacacaatcttgaggttacagagagaatgaggactcagagcatggccagaagcaggttatggtggtaaattcagttatggtggtgaaacaagttacaggaggaagagaagagcaggcctggctagcgaagggggccttgttacacagaggaaacctcacaggcagcagccttcagagagatagatggcaaatgtttcttttagacctttaaagatgtcagacactcagttaacctttcctagatctggacaaggaagagcctcagagaaagccatgctgcatcaatgcagatttgctttacagatgcaaatcttccccacaaagatagcttctcagctaatcttgtatttccagccctctgagaggtaatcttaaaatatgtcaaagcagaatattttggggtgaaatattttggtttccctcagtccccttttcacaaattttgggaatttactggccacccttatcaactgtactttggccatgacttaaggtgtccttggaataacctgttggctccccattaaccttgtggacaagggaagtgtcaattcctggagaatggctacagggcagaccaaaccaaaggtatttatactctaagagagcacactcttaactactcttacataataaagatggtcagtgattacaggattcttgccttcattcagccgctcaacaaacttttgaaagttgggagtgtgcaaggtccttatgacaggtgttttacctcaagaaaaacaaaaaagaatattgattgaaggatactgaaaagttcccaatattgaagctttaaaagaacaggcttcaagaatgcagtgaacctcagcttcaatacatatcctccttacgtggacctgctagattgaattttctaaagaaagagtctcattgtcacagcctgagttttattctggttccctgacccatggtttgggttaagggtagaggagcatgccaaagggtgagcaaacagctattatcagggaaagaaaaggggaagagatgctgtgtttaggtatcatttgaaacaccactgttcatactagaatacaagccgataaaatattatctatcttcaagaaggttttagactgacagaaagcaaacatgcatacaacatatagatgtaaaatattcatcattgcaaaagaatctccaattctccacccttctctgaaccacgttaattgtagtgtggttttacaattcctcccactaagaagtagaacccatatcttactccttgcacctggtctgccttgtgatttacttcaactaatagaaggtggaagtttcaagcccaggcctccagcagctttgcacacttaggctctctatcagaagcctgcccagctgtcatgtgagcaagcttagcctaacctgttagaccacagagaccacatggaaggcagcccacttgtctcctgactattctaaaccacctaaaacctgctgggtccaaaacatgtgagagagccccaaataaggaggagaaccagctcccaatctgcagctgacatcaaacacatctgcaagcccagatgagagagaaccacctagccgatctatagtgtcatgaccaatgattcatttttattattttaagccactgagttttggggtgttggttatgctgtggtagctaattgacacaatatgtttatgtagttgaaatccaagagggtattagatggcaatttgaaaagggctgaactaaattttacaggaattcagagaaagagttggcttcttggttagaaaaacaggaataaacattaccttcctcatcctcctctcataaatgaatgaaatttcaacttagctttgaaggttaagtggaatttccttagctaaaaataaaaagggagcataacatctttatttatttatttatttatttgtttatttatttatttatttttgagatggagtcttgctctgtcgcccaggctggagtgcagtggcacgatctcggctcactgcaagctccgcctcccgggttcacgccattctcctgcctcagcctcttgagtagctgggactacaggcgcccgccaccatgcccggctaattttttgtatttttagtagagacggggtttcaccgtgttatccaggatggtctcgatctcctgaccttgtgatccactcgccttggcctcccaaagtgctgggattacaggcttgagccactgcaccaggccaacatctttatttttaatgaatatttcttcatttgaagtttgcaatgactttcttatgtatttcatatgttaaagataaattacctgcctctgtgactaagaataaattatataaatacataaatttctcgctctcacatgccagtgatcaagaccagagttacagttttggaaagacaattacatttgcagtgaacagaataacagtctacagcaaacatgtacaatcaccccagcacctattggatgaaaacacacatattttattcataaaggtcaactaatgggatgcgttacattacagagcataaacagcacaggcctcatcttgaagcatgccacaggctttcatctcctccagatcagtcagctatttgttgcagattaccccaagaggtgagggctctatcccctcaggcagttctgggtgaggtggctcctacagaccaaggggaattctctggaggaggaagccatgagccaactctcagggcagctggagggagaacacactggcccggcaaaggggacctgggtggggaccaacagcatcttctatggttttataatccagcctgaaatatctggctgtccctcactcctgctcttctttccaagtgagacacagtaggagcaaggcttggcttcagctcacccccgactagagcatttttttttacgcatttccactggtcacaaaactcacatcactatttcactgacgccacagccattaacagtcatgcaaagaaaatagccattctatattgttctcctgtacttgcgtaatgtttaaccatgccttttacttgaagaattccagaaactagtcttaagagatccaaaattgaacaaaggttgtggagtgtcccaccttgagaaggaattctgaacaactgatttatagccttgttgctgcaggcaagaccagcatgcggcccatcactaaagataaccatcgcaaccagatacgctgcccttataccctaccccatacaggctttgcccagcccagtctgcatacctaatctctgatgtcaattcctgtgctttgcctaataaaaaaaatccctacctactgactcttttcagggagccagcctgaaaatccttgtgtctctgctgtctcccttgtcccgcaacagagacctatgtgggaaatctacttgatgccccgtgttaatttccattacatgaggagtgtaagaccctgtggtctgtaacacaagccctctatcaatgatcagtggtcagtgaacagcacaaacgctttcacagtgctgactttgcagagtctgttccctcaggctggactccccattcctctttttctctttgaaagctctactttattctctacaaccaaccccaattgttgcgctctcactcaagtctcctttgatccctggaaaggatcaattactcatttttttctatggtttcaaggccttttatataatccactcttacggtacagacatcattttagatatgttaaatgagttgacttcctggctagattattagttccatgaggacagggattacatgtggctttttttctctatccccagcatttacaacagtgcctggagtacaggagatgccctgtgactgattgatgaataaatcgatgcctacatgagaacaatgttcttctttgtggaagaacaaagtaattcattcagattctgctttctatttaaactaaagaatcctgctgagctgtgtccctgaaatagcctgtgtaagcaccctgtttactcataacctgggaggcttttagcttttagctaaaattgtccatgtcagtggcatagggcatgcacacaattaaaagaggacaataaaacgtccttgttcaagcaaatgctgattcaattattggggctccctggcattagccactggattcaattatctccaagagcaaaagctggaaatcaaggggttgaaagaaggcactgacatttaagcatagagatcagactcaccttgacctctcatctttttggatatagtgatcatatagaacgtgatgatcctctcatcaacttttggaccagctttcccccgttattcccctcccatccattataaaagagacctaaaatttctgataacttttatcgaaatataatctacataccaacagtgcaagaattataatggatttataagtaaattatagattaatttttttaagtgagcacacccatataactaacacccttatcaataagtagaacattaagcagttcaggaacttgcttcatttccttcctgtcacttccctcccaagcactaccagaatctagtgtctaacatcgttaaacagattagggaataaggagactcatacaagggtgattttttttttcttcttagaacttgtattattttaaattgacaaatcataattgtacgcatttatggagttcaatgtgatgttttgacaaatgtttataataatgtgattcattcaagctaattaacgtatctattgtctcacttgacattttttggggtgatacatttgaaatttactctcttggttattttgaaatttataatatattattattgactatagtcaaacaaaaaccccaaaacataacaaaatgttgagacttctaagtctaataaggtatggaggatgcaacggaaggcttctcccaggtgggcaagccacctagcgatcctgtgaggtgtcatggcaacatgtggtaatatctttaccagatgatggatgcctgcttttttttgtttatgctgtgatgtgaatgtgtgtgtgtgtgtgtgtgtgtgtgtgtgttctaaccatgtattaagagaacagaaatttttattatccgtgtctttatttgaaaaccacttggcaaagagacatctggggaaacgcggctctatctttcaaaagcaaatttccatttttacacatagaaaagagatttcgtgtgtgtgtgtgtgtgtgtgtgtgtgtgatttggtttgcaatgggagctctccaaggcccctttcttatttcatgttttaaaatgctgtgattctacatctcatcaaatataatagaaaagttcaagtttaatatatcttacaaaaattgccttcctgtagattatgcccttcagctatcattttaaattgtaatttgcaattttgaaattctcccataaaagaagatgctttctttagtcaaaatagaagtaacttaatttttattgtctggctaaattgatccacttttcttttcttttgtttgatggacttgtcatgaaattgtagaggtgcactgttttctaaggaaatgaatatattctttgggtctcagtgagtgactctaaaatgcacttatggtaaaatagctataattctgttatagttttattcttgaatccagtttttaaaggacaataagtattaattagttccagtggccttcaatgcaactaaacatatattttggagtgtgtaataagtgtgatacactgcagacactgagataaggtaagaaggcacagggtctcttcccttaaagagttcacagaggagcagggttagggaaaataaggggtctggtggggttgtcttatgatagattaaatgagtactttggagattgcgtaagttgccttgctgcatgcctgttaacttagttcaatatcagtgctcgaaaactacattgaaagagtggatggcctagtggtagacacctggggacaattttgtttcatccacatctttagtgagttctagaaaacttgaaaactgtgtgcctttcatctgcacttttctcagatcgcctctccttcctggatggatgtgaaaatcatatggaattaaaaggccaaaactcttcctgtgatattgcaaagtccttgtaaaaatacttttaagtggtatttaaatagcaactttaaaggtaacaaaactacgtatgattgaaagaaaagtaagacagatagaaaacagataggtcaatgtaaatcatgtgcgaaaaaattaaatggagaagagaaaggcacttaaacacagttcacatcattcattttaaaattcatccaagagtagttacaacagcttgggaatctctgtggttactctctagaaacaatatcttgaaacttgaaacttatcttgaaacaatatctactgataacacagcggactgaaggacaatgacaaaataccgtaaggcacacaaaatagccacacccaaatctgagaattattgctatgttcccatatgaatgtcctcaggctgccataacaaaataccacagaccaggttaaacactgacatttattttctcacagtccggaggctggaagtccaagttcaaggtgccagtacagttggtttttggtaagcgctattttcctggcttgcaaagaggcatcgtctcattgtgtccttatatggtcttatctctgtgcatgtgcagagagaggaagagagagagagaacgctgatatttcttcttttatttattcggacctcagtcctattggattagggcatcacctttatcacctcatttaacctgaattagctccttacagggcctatttccaaatacgtcccattgggaattcggacttcaacatatgaattcacggaagacagaactcagtctattaacagtaggcctcattatcattctcagtactaaagttctaacatcttagaaaatcaacttcataaattagctaaggtgtctgggcccagatccttgagaaagaaaattttcgataaaaattgttaatccaaaaaattagcccctctcatgtatcagcatgatcttgattggaatgggaacgtcctgccggctaatttgttgagcaattctgcacttattctatctggcaggaaatggtttaatttatatttaaacacaattggcctccgctgccttctcctcctgcttctcctcctcctcttcgtcctcctctttcttcttcatcaaatccacaagtttcacccaaatcgtttcaacactaaccatcttttcactggaacaattccagcttcaacaatgcttttctctctaaaatgaagcctcacataggcaattatcagcatttcaggttttgaaagcgactttctttccccaacttgggtaaatgaacaggaagcagttgtcacttcagctaccatactgtaaattattacgtgaatagccttatgagtcaagtttcttttgcactctttgtgccctttgcatgcaggcattttttttttccattctcccaggttgctcattgtgattgtgtaggacccattaacatgttaacagtaaaaatgccttttatcatttattaatatttgcctttttctttgaagtttgttgttgttgctgtattggccttttctacttactcaaaattagtatgcagacattttgagggtctaactaagaaatacgcttctacagatggcatgagacagggtgaactgaaatgagaattgtattttggatgaagaagatctgagtttcaattttgattctgccaaatactatgtgtgtgttcttgggaaagttgctccaccttttttgccttactttttaatctattaaatggagagagtgaaaacaacctcacagaattgctttaagcaccatagacaagaatatattgcattgctgggcatgtagggggtgcttaataaatggagactattacaatgtcttcaatcctcattagtttacagacattaaagcagtcgtattcactgcaattttcctgattggagcataacaccaagggggcaaatgtaggtcctcaagtcccttcctcaagcttcacacaattatttccaggattcctaaggggtaggtctcaaactcacacatcactgctttggtttttgataatccttctagttgagggcctctacctgagagcagctgctgcattgtccattgcaattcagtgccaactttgctgggggaatgtcaaagatgaacaacacagggctctagttaaagtggtaaagacagattttaatcaataagaagagttgcaatagagaaaagagtgcagcatgtactgaactcaacttccatttgttcagatgtgaatgcatgttttaaagagagagtaagggaatatggaggggggaaatggtggtggaggggagtagtagagtcagagaagtgaaaaattacaaagggttagtcagtttaaatgccattaggccagctgtgtctgccagctagcaattaatcaaagttaggattctatcttcccactgagactggaagtcagaggccctatccttgggtgtcagccacaacaaacagtgaatcttctttggcagccttgagttttctcaggcagtcactttaaagaggggtagggtcatttagggatgtggccttagctgttagaaactgtgctagtgtttgctcacatttataagccaaggttagacctagttgagaggagggctcaaaagagcctcactagagtttggtaaaggaatctttgggtcgtcctccttgagcttccaaggcttcaaaccctggggccactcagcattccctggagcctccgaagcctgcagatggaggccatgctctgttcccaaacctgggcccctgaacacatgtgcagggcaccttagtcaagagaatgacttggcctgccccttctaccttggcatccttgtaaaaagccactttttttgcttttttccaatcaaaaataaaataaaaacccatcatggagattggcatctggcagcatgtcccctgattttgtcaaacttgcttcttcatgtccaaatgccagtttcagcctaaagtgggtcttccatttcattgataaatataggtattcagccttctcttatttactctttaagactactagatctatcccccagagattttaggtcaattgatcatagattattaagagctgctgttattttaggtaatttttattctttgaaaaattagaatattctctttctacattctgctccaggacatggatagccacctcccacaagagtctctccccacaggattcactagtccggttcacacttccctattccatgtagactgggggttgttttccaattagaagatgtaggtaaaatgtcattgtcaggaggctcccaatttcctcctatgtatctcacttagaatcagaatatgctctcattggcagcttcactatgaacagccacagtccccagaagtacagcttacaaactaaaatggaaaggatacttttttctactcaattaggtttttaaggggaaaataactttttttttttaacttagaaatgttaaattgaagaaggaagggaccctaagtatgagttaataccttggttattacgctgtttgtctccattcactgtttagaactagccctccttttatacccaggtttgagtagaatgtatttgtctgcagcatgctaccttagagtttaaagccctctgcacggctgtacttactgtgttaaatctgtgaaaatacattttaaatgcttttctcagctatcaatggcttcatagcattgtagcttcaaataatctattcactgtgctccaaatggaagcagaagagagaagccactcttggggaggacaaaagaaaaggataataatagctaacactcataacttacatgcttatcatgtatatttacctgcatatgcccaaaattatatatttacctatatatgcccaaaactcttctaagcactttatattcattaagccatttattaagtaaactaagcacaaggattaacagcctgagtattttactctgagatatctgagtttagattttctagctgaaacagtggaatgaggaccttggcaaaccctcttccctataaaataataaaaatacaagcaaaaaaaaatcacatacaatcatttctttaaaacagtgagtctgtgtcattttcacttgggactattcccatcccaccgccattcccagctcagtggccaggtgactataaaatgcctgcagcctggcagccaacagagaaaactgacctctttggagctccattaaaagctgcagctccagaggatagtcaatatgttgatcaaattagctgctctccagtaaatccccattctaaggcaggttgttttttctatttgatttgacttgaatctcagatcagataaaaaaaaagtactatcctgagggcatgaatgaaaacaatagcaatctcctggtaacactgtcacataacagctgcctaaggctgtaatttcactgggggcaaacagaaccctggacaaaaatgtaaaaggatgacttagagaactagatgaccatagggaactttaaaaagctctgacatatttctgagactctagaagggatgtgtgcctgtgcagggttatgcacatgagtagggcgtgcccaggaaagacctgggaaaggtgaaagctccaaacactcagctcttattgaccttgaagtcatgcataagcaggaggtgaaagctaaagccgactcctatgctgcctgaagattgaaggtgtgtctttgcatagagagctccatgactccaggcagttaaggaaacctgacagatcagtggctaatccctaagtgtactgacccaggagtgaactctaacccagtcttaaaactgaaaataacacttaaattaaacaaacaaacaaaaaatgctagtaaggaagtcatgggctgcatactgcagggaatatagaatctagaggattcctctaggaaagctgatgacaaataagtaacaacaacaaaatgcaaagtggaaacaaccattttgttaagtggggtgaggggcaaaggagagaagtctgataccagagttgctactatgttatctacaatgtctcaatttcagcaacaaattatgagacatgcaaagaaagaggaaggtatggcccatataaaagaagacaagcagccaatagaaaatgtccccaagtaattcagatgttggcttaacagttaaggactttttaagttagctagtataaatatagtcaaagagctaaattatgtctaaacaattaaagaaaattttgatgatgtttcattgaatagagataggattatagaaagaattcaaaaaattcttgagtggggaagttcaataattgaaatgaaatattgactggagaggctcaacagcaaatttgacctggcagaagaatcagtgaacatgaagattggccagttgagattatccaggttgagaaaaacagtttggcagttcctcaaaactcaaacatagagttattatatgacataacaatttcactcctaggtataaacccaagtgaattgaaaacatacatctacaggaaaatttgtacataaatgtttattgcaccattatttacaatagccaaaaagtggaaataatccaaatgtccatcaatttataaattgattttttaaatgttatatatccacacaatggaatattattcaactattaaaaaaattaagtaatgacactgccaccatatggatcaaccatatgcttaaaagcactgtgccggctgggtgtgatggcttacgcctgtaatcccagcattttgggaggcccaggcaggcaaataacgaggtcaggagatctagaccatcctggctaacacggtgaaaccccgtctctactaaaaatacaaagaattagccgggcgtggtggcaggaacctgtagtcccagctgctctggaggttgaggcaggagaatggcgtgaacccgagaggcggagattgcggtgagccgagatcgcaccactgcactccagcctgggagacagagtgagattccgtctaagaaaaacaaaacaaaacaaaaaaaacactgtgctaagtgaagaagccagtcacaaaagaccacatatgtatgattccatttatataaaatatccagaataagcaaatccatagagacagaaggtagattagtagttgcctaggactggaagggaggatggaatgggatttattgctaatgggtgtggggtttctttttggggtgataaaagtgttcaaaattagattttggtgatagttgcacaattctgtgactacactagaaaccactaacctgtacattttaaatggaagaattttatggtatgcaaattatatttcaataaagctgctaataaaaaaattcttaacctctctgaacccaggatcccacatctgtataatattacactgtgtgctgagaattaaatgagatagtgaataaagtgcctgccaaagcccaagacatagtgagtaatttagataaggaagttttctagcagttttccatgaaatgtaacaggaaaaaacagtaatatggtgggtttgattgttttgaactgtaggatctagttaaaatagagttacggtttcttcttaatcaagaaagtatatcccttttcagtagatattaaagactgatatttagccaaaatcattcacaagctaaaatatcactcttcttttatataaacagtttgctttcagatgaacagatttcttcaggaatttgaagtagtaaaatctaaatatacggacaaatgagacttcaacaaagatttcaagcaaataaatatattgctttaaattcacgttgcatctacaagatgcactaacaatatatttccagtgagagttggagtcaagtatttatctatcaaataaattcagtcgaggtctataagatgtaaaaaatagtaatgtgtattaagaatctccaaaagtatatgtagttgaatacattccccataatttcatcatggaatccttttcctcttaaatatgcatatgtgaccagtgttctataaaacacactttggaatactgatatgcaaataatatatatgaaataactctgggccaggcagggtagctcacgcctgtaatcccagcactttggcaggctgaggaaggtggatcatgaggtcaggagttcgagaccagcctgacaagcatggtgaaaccccatctctactaaaaatacaaaaaattagctgggcatggtggcgcgtgcctgtagtctcagctactcaggaggctgaggcaggagaattgcttgaacctggcaggtggaggttgcagtgagccaagatggtgccactgcactccagcctgggcaacagagtgagactccgtccccctgcctcccgcccccccccgccccgctgccaaaaaaaaagaaagaattcttctccacaagtaccaaatgcacaagtgggcttttttgcatctacgaaggcatacctgttgtctttgtgatgctgatgaaaggcatgttccttatatccaggaaaaaaagcacactaattttgcctgtaacttcaggtgtctatatctcctctccaagggacatagctggtttaaaattcttccaaaaagtgaagaatctccttaaactatgtgtctcaacttttgccgtgaaaattaacaatcttcgtaattcctttcaattttctgtgtttcagacattaatgatgagagttttacacatgaacattgctatctcagtaagagcaatctgtctcatcttttcaaacaaaaatatgaaattcttaatccttttctaaagaatataagcattgtgaaaattacatgatcaaaaataacattcacagtaatactgaagtgtctcagttcagaaaacaatgcagaataattaccttttgtattagtgtcacctttcatccatactccttgaagacaaccaaactttacattttcctaaagtattctggcatttgttcatatgcactaaacttgggttttgaaaactgagtccttgtcctcacagattcattttaaaacaaaagatttatccaccacatcttccctggctctaacaaaggaaaggaataagtcagaaagaggaaaatgtatcagagagaaacttgagggcgcctcatgattgtagggggattggcagataggcttaaaaagagaaatgcaacaccagcaaactttttaaattcacatatgaatctactatgtgtttgatagttatgaggggtgtttcccatcagccactgttctagatattcacaataaaaagttgtttcctacttgtgagatggtctaaatcactgtgttcaatagaaatacaaggtgagccacatatgcaactttaaatgtttttaatttacttgtaaatttgcatgagtaaacttaatttcttttgatacacagttctatgagttttcacaagtgaacgctgtattaattttctattgattccagaacaaaatgccagtttagtgacttcaggaaaacaaatatagtacctgaaggctctgtaagtcagagtctggtaggattctcactgggctaatatcaagttgaggtcagagctgtcttcctttatggaagctcaggagataattgtttccttgactttttccatctcctagaggctgaccacattccttggcttgtggttgccttgcaaaggcaagctaagtccttttcaaatttcctctttttccatctccctttttcacctttaaagatacttgtgatgatacagggcctacctggataatccaggataatctctctatttgaaggtacactgattagaaaccttaatccataaccttaatttccctttgtcatgtgacctaacatatttactggttctggggattcaaatatgaacatcattgtcaagggccattattctgtgtatcacaagggcatgaagtcatgtaaactccatcatggtcaagacaataaacagtttcatcttcctcaaaaattctctcttcctcctactttgtgctcaaatgctcccccaccctaacctctgcaaacactgatgcattatcgattccttttgtatgtcccttcgagatgtcatatacatggaatcatacagtagtggtcttttgagtctggcttccttaaattagcataataaaataattatccatctcactgaaagttttcaattgttcctttttatttctcagtagtctttctttaatcccttcaccagttaaaggacattaggttgttttggaaattatgaatgaagctgcttataactattagtgtacaggtttatgcaccaacatattttcatttctcttgagaaaatacctaggagtggaatagatgggtcatatagtaagcatatagttaactttgtaagaaactgccaagctgctttccaaagtggctgtaccatcttacattctcgcaggtgatctatctatgccagttgctcaaaatcctcatcagcatttagtattgctgtttttatttattatagccattctaataggtatggagtggtatccaactgtggttttaattggtatatcttcaatggctaatgatgttgcacttctttttacgggcttatttaccatcaatatatcttctttagtgaattgtttaaatattttgcacattttacttttggcttgttttcttattaatgaatttttgagtgtttttcatatgttatgaataaatctttttttccactccttttcctgagctgtaataaatgttctttatgagatattctatttgctattattttcttctagtctgtggcttttcttttcattctctaataggttctttcagggagctaatgttttaattttgatgaggttgtatttatcttttttaaaacagattgtgcttctgatggtgtattggagaactctttacttagtcaaagatcacaaagattttgtttgcttgctttttttatagtgaattaaattgacttacttttgagtgttgtattcctggaatgtgctctacatagttatgaagtattatctttatcaaaattgttgaattttatttagaatttttacatgtatattcttgaggaatatatgtctatagttttattttcttgtgatggctttgattttgatatcaaggttgtagtggtctcagagaatggattgggatgtattgcctcttcttcaatttttagaagagtttacctgaattgttttgatttcttacttaaatgcttgactggatttaccagtaaggacatctggccctggatttatcattgtagggaggcttttaactacaaatttaatttcttaagtagataaaaggctgtttgcgctatctttttttttttttttttgagttagcttttgtagtttaggtctttcaagaaatttgtccatttcatatatatttgtccatttcatatacgttggctatcatttttttgagttaacttttgtggtttaggtctttcaagaaatctgtccatttcatatatttgtccatttcacatacattgtcaaatttactggcataaagtcactcatcgtattcccttattatcttttaaatatatacagaacgtgtaatggtctcatttctatcattcctgacattgatagattgtgccttctcttttttttcacaatcatgcttgctagagttttattatttttattgatcatcacagaagtccagctttttgcttcaatatttgtctctactgtgttcctgttttttacttcttagatttcagcattgactttattatttcctgtcttctgcttactttgtttttaatttgccttttttctagttccttgagatgcaaactgaagacactgatttgaaacctttcttctcctctgttatgggtggttagtgctataaatttcttcctaagtactacattagcaaagtcctgcaaattttgatatgttgtgtcattcagtccaaagtactttctaatttcttttttgatttctgctttagcttctgggttattttgatgtgtggtatttaatttttagatacgtagcaattctctagagatatttctgttattgatttccaatctattccattgtgatgaatgaacatactgagtgtattagtctgttttcatgctgctgataaagacatacctgagatgggataatttacgaagaaaaagaggtttaatggacccacagtgccacgtggctggggaggcctcacaatcatgccagaaggcgaaagacacatcttacgtggcagcaggcaaaagagaacttctgcagggaaacacccccttacaaaagcgttggatcttgtgggatttattactatcacaacagcacaggaaagacccatccccatgatgcaattatctcccacagggtccctcccacaacacctgggaatcgtgggagctacaattcaagatgagatttcagtggggacacggccaaaccatatcactgagtaggactttaattcttttaaatttataaggatttgtaatataatgcagaatatctcctatcttggtaaatattccattctttgcacctgcaaagagtgttttgttgaagtcttcaacatacttattgattttctgactacctacttgatgtggtttgaatctgtgttcccatcaaatcttacgtggaattgtaatccccagtgttagagatgggacctggtggaaggtgattggctcatatgggtggaattctcatgaatagtttagcaccatgctcttggtgctgttctcatgagagcgagtgagtgagttactgtgagatccggttgtttaaaagtctgtgtgtacttgtaccctacaacttcaagtataataataacagaaaaaaaaaagtctgtagcacctcccttctcactcttttcctcctgctccagccatatgaagatacctgctttcgctttgccttccacctgagcaaaaggtccccgaggcctccccagaagcagaagtcgcatgctgcctgtatagcctgcataacaatgagccaattaaacctattttctttataaattacccaatctcaggtatttctttatagcaatgtgaaaataggcgaatacactagtctatcagttattaaagtggaaatactaaaatataggctatagttgtggatttgccaatttttttcttgcagttctatcaggttttttttaaatgcatgttgaagctctatcattttttttttttagttctcgaatttccatttggtagttttttacttatgtctttgctgagagcttctatctttcaagagcattaactttatctcacagaagatggttataatagttgcattaaagtctttgacagactattccaaggcttaggtcatcttatgtttggcatctatttactgtcttttgccttgaagacagtaaatttttcagatttttctcattcttattatgtcacataattttggattgtatccagaacattttagtttcatcttgcaagtttgtaggtcctgttataatctaaaaaatgttaattttttttagtaactgataattaacatgattagcttcagactgtcaagaagtttcaccttcaatgatggtggtcccaatgtcaattctgttttcaaagtctttactgtgctctttgggccaggctgatgcacgctgcacttggagaagagcctgaaatttgagtcatagtttatattgtagttcagccctcacaatctttgctatgccttggtgttgttccacacatacttagctcagggtgagtccaagagttatgtcattacatacccgaaatttggaattctatttcttcagctctttcatctctgaattttctcccacatgttcccataatcaatgacctttttcccctggtatctctagccagaaagattgaatcttcttagatgtttagcctctcacaacgtcatgtacttttgagtaaatagggttactttaaggttaagtggaaaaagaaaagagaatgagaaaaatggcatggattgtacacactctggacaataggagcttctttttagctcctctggctagaaagacaagccttctgccatggttttaggtttttcttcactgccagacatctatgcagctcagttactgagctgctctgggcagggtctggaggtaaatgatttaaaaaaggagatgggggattctccccacattctccagcatacagaggtcctttttacttgtctttagtcaaaaagaagggattcttccctaaagcatttgctttcagcacctgctgtgcagttctaggacttaaaccccctcttgagacaatgctgacagacaaagaaaacaacaacacgaaactcacctgccatatcccacccctctgctctaccccttttgggtcattactcatgttttgacatcaatcttcaacccacttgctgtggttactttgcagagatcttgggcagttctattcacattctgcccagattttttagttgtaatcagtaggagagacagactacactagacttgttccttagccagccaacatatataatttcaacgagttggcttctctcttactggctatctcaccatgtgacaggtctgctccccatcaccttttgccatgattggaagtttcctgaggccccacaagaagcagatgccagcactatgcttcatgtacagtctacagaactgtgagccaaaataaatcttttttctttataaattacctaaccttaggtattcctttatagcaatgcaaaatgaactaacacaagtacacagtatatatcctatatgaaagttttgtttctacatttctgtccctgtaacatcatacttatacttatttcaaggtcttcctcatcaaaggggatatgctattatggtactagccacaaatatttatttatttttgcagtgccttataccatgtaagccacttctgaagggataaactagagaaatgacttctgtggtgccagtctcgacctcctgacctcatgatcctcccacctcagcctcccaaagtgttgggattacaggcatgaaccaccgcgcccggccaagtatcttatttctttttctatttgatagctaatcgtcaagaatcattttggaatgcttcttggcaaatctgtatgggatgatggccataaaatgagatctaaaactgagctgcatttgaataagaacttagcctctgtattaatcctctcctcaccccctaagcatctcttacttgggtatgacaatcactttaaattccacaaagcaaggaaacttagaagcaaacaggcccttctccaggatttggtaagtatctagtcctgagcttaagtggggccccaccatgaataggggaccagtttacaaaacatatacataataggatctcaataattatttctttgaataagaaaaatatgctatgtttgctatcactattcacagaccaattctttttttttttttttttttttttgagacagggtctcactctgtcagccaggctggagtacagtggtgcaatcttggctcactgcaacctccgcataccaggtttgagcaattcttgtgcctcagcctcccaagtagctgggattacagggacacaccctcacacccagctaatttgtgtatttttagtagagacggcatttcaccatgtttcccaggctggtctcgaactcctggcctcaagtgatccacccgccttggcctcccaaagtgctgggattacagatgtgagccaccatgggcagcccatagaccaattatttaaaaatcatgtaggcattctcttaaccagagaatgtaggtttcaatatcctgctattctataacacagaaagtttcctgaatttctggaatatgtaataccttcacctccgaggtttaagaaactacatgaagattccatccttaaattataaatgtacagttttcatggtaatcttcctggtatttttaagcaataataaaatacttccagaaaaaaataatacggtccaggtatgaatactgctctgaagaaagaagaaattggcaatcttaaaagcggaagagctcctatatatctaaaacactaaaatcttccaactgacaataacactaatatgtgagttcaagtggtttatttggaggcaatcccaggaaacattagtaggagagcagcaggaagacagagcaaggaggaaaggcaatcttttgtgtattaataggcagcttatcacatgagcagctagagctccatccaactggggacctttggaagagagtgtagaacacatcttattcagagttgtctcacttgcggggtgaaggttgaagactgctccttggacaatgccttctccatttcctcatacttcacctgcctgtgattgggccaagcctggttcccattgcccaagaaagctctcaggaagatgctcaagtgcttgcagtaagaagcaatcagcttgcaggggatggtgagggccactagcttcgcctctgtcctctttgtttttcagtgtagatgataattgcaggagactgatgtagtcctcagcacaggccacgaagagactgttagaaggaaagtggaggaagattgattattctgatgactcttcaccatgtaatcttgtattctgatgactcttcaccatgtaatcttgttgagtataaagtcaaccctgaagaatgaaatcacatctttcctgttttgatatatgcattgccaataactaacacagctaactaaaagttattttctctccttttttcctttgtcactggatatttttactgtgttttggtcgcttaagagtatcatttacaacatgtctattctaagtcaagcaagaaaaagagcagtttgttcaatcttttatctccactatattggtttaaaggatcatctctctctacaccctacagttgcctttagttctacatttattggaagcaaccaaccccagtggtggcctatttaacaccagcacaaaacctagaaggtttaattgaaagcactggcattcaagctgtgcttagtagctttcagaaaaaaactatgtatttaagaccggtattgagtggaaccccatgggtctcagggcacagagcccagggagcaagatctgaaagagctgagagaatgtccagtcataagtgatcacaattgtgacttaatctaataatacagaatgaataaattgttaatagtttagataagggactgtcaaaataagattaaaatagtctttctcccaataaaaacaaaaagattatagcaccaacctattccttttttatagctgataattattcaaagatacagaggagatcagcaaggttattttttgtcactgcactgcttgacaacacgtctcaattattacccattgttcaggattaatgtcatttttctccctataatacatacagttagaggatttttatggctataatttccaccaccatgaaactaaaacagagccagaaatttttttttttttttttttttgagacggagtcttgctctgtcacccaggctggagtgcagtggtgcgatctcagctcactgcaagctccgcctcctggggtcacacctttctcctgcctcagtctcccgagtaactgggactacaggcgcccgccatcatgcctggctgattttttgtatttttagtagagatggggtttcaccatgttagccaggatggtctcgatctcctgacctcgtgatccgcctgccttggcctcccaaagtgctgggattacaggcgtgagccaccatgcccggcccagaaatgtttatataattataacttcagtgtttagaaagcccatgtcagaattgttaacgagatattatgcattaaaaaattaaagtaaatgtaccaaataaaagcttcatgaaataggtagagaggtatcaccatgtcctcattaagtaaactagaaattgttctgtattggtattttattttcaggctaatgttttaccaaattgctttttttttttgaggcactttatatttaaatgtgtttttatatatgtgtttatataggttttatatgtgtgtgtatgtgtattaaccattcttcctcaaaataattctccagagagattacaaatacaactaattggtcactacttttctgaactccacagtccacatataaatctgccaaaacttcttagtgagtaaataaaccattcaaataaaaaaagactcagattctccacagagacctagtacactactaggcagaccactgatagatattaaatatcaaatgaaagatcatatgaatagcacactctgtatattcagacacttagtcgtgacattcataaatatttattgaacccccaactgtgtgtgcataactattcgaacccttttggagaataccaagaagcatcctacctcccgtcttcatttttctccatagcatttatcattttcatgtatactatacattgtatttatttgttttctttattgttctcccctactagagcagaggttcccaaactttttggcaccagggactgatttcatggtgttaccagtagagggtcttgactgcaagttgtccaggttcttggcgttttgaacaaagaattggaaaaatgcgcaacaaagcacagaaagaatgaagcaacgaaagaacgaaagcaaggatttattgaaaatgaaagtacactccacagtgtgggaacgagcctgagcagcggctcaaaggcccggatacagaatcttctcgggtccaaatacccactggccacttcatgctcacctcatgtaaatgaagtggtggcctgcaatcagaggagttgcgaagagtagttacaaagtggactgaagtggagttaatgaagttcacactcctgtgcaaatatctgattggttgctttttgtaatcaatcacaggctaaggtggagttacaaagttgcacttctaggcaaaggaagactggaccggccatcagtctgattggttgcggacagccaatttcccatctgcttggcagaaaaggtcgggggtttgcaaagggagtagcctctggtccttttttcccttaggcgtggaaagttagggttttcctttcaatttagttctaggaagtcagcatgaaacgaccttaggttccctcactccagaacctatactcctgcctcaatggaagacacaagtttccatggatggaggggggatggtttctggatgaaactgttccacctcagatcatcaggcattagttagattctcataaggagtgtgcatcctagatcactcatacgcgcagttcacaacagggttcgagttcctagagaatctaatgccaccactgatctgacaggaggcggagcacaggaggtaatgctgctcacctgccactcagcttctgctttgcagccctgttcctaacaggcctcagaccggtatcgtggggagacccctgctggtatcaattggggacccctgtactagagtatagatcctttgaagtagagactacatcagatgctgtcagcatactgacttttatcccctgatatgggttgaattgtgtctcataaaaaatatatgtatttgaagtcctaacccccagaacttcagaatgtaactttattggaaaaagtctttacagaagtcatcaattcaaatgagttcattggggtggggctctaatccaatatgactggcgtccttatataaaggggaatttagacacagacagaagacaaagtgaagacagaggaagaacaccatatgtagaggattagaacgatgcctctacaagataagggatgccaaagattgccggcaaaccatcagaagctaggaaaggacaagggaagattcctctgcagttccagagcaagcctggccctgccgacaccttgatttcagacttcgcgcctgcagagatgtgggaccatcagtcgctgttgttctaagccatccagtttgtggcgctttgttacagcagccctaggaaactgacacacagtctcagcaagttttacttcaatccacactggcccatcttttattatgtacaattattcgcctgcaagctttttctagttgctggagttcagatttgcaggagggttcaggaattcatgcggcccctccctgcaagcagccctgatgggagttggtgggaatataaacctcccagctccctcactcatcaagtgtgtaatactaagataggtgtttcctcgggttccctaataggttgaagctctggttggccccagtgtttaaccttctggaaaacatacctcttccttgcttcctcttcttgccatcccacttcccccacacctctactggtgttttctgacatcacttctccaataaactgcctgaagatgaacccatatctccaggtcagcttctagaggagcgcagtctgagacagggagtttctgtagctcactgtgaattctctggactaagaacagtgtctggcaagtagtgggtgttgaatatatatatgcggatgaaagaatccatgaagcagaatacttatcacttgccctcaaagattctacaagttagtcatcaaatgcagagttagtgagtaagagcaggtgacctgttgcaaaagcaatgcaagagaggccacaggagaatttgaggttacaagctacatgaagagtacagacaacaagcaccctcaagatattaagtggaagaagagagcacagagggcattggtaggctcacaaggcttctttgaagggcgacagtcttctgctgaagggcatatgccacatacttactattaatgaaagagacttttgccgaccttcctaaccaacaggtattctatagtagaacagaccaaccctaagcaatgttgtagttgtgcaaatgcacaaagcttgccagtcccaagttccacagcaattcactgtgaatagctgaaccaaaacgagagctgaggtattattttgagagagaatttgatttgactctggttaattcagatcaaagtgcattaatcagatttacataaatttctaaacactaatgcatgtgaggctggggagcctacttattgtgaaatttagatgagcagcagaagaaaatctattgacatgacttaaaatagacacctttaagtacatcactgtaattactactattaatttctatctccatcactaccactccctactaaaaccagtagctatatggtaggtactctgctcagagtttatgtgaattttctcatttaatcaccataaccaccctgagataggaattcttatttgcagatgaagatacctgcatagaaaataacagagctgagattccaatgcagttctgtctgattctaatgcaattcccatgtgcaaaaatgttgagtgtgatatgtaatatgagtgttttcttaatctttttatcatttccagttgttctgttcaaggaatcgaggtcaggccttaaaagctgtgagttattttgtctagtaaataatgagagagaattcatagttctgcagttcagcatatgttataagaagcaaaatatggcagacagtattttctaaagatgaccacaccattgtatatcatatcccatgtgcttatcctacaagatgatatcgacactcttccattgagagttagagtctatgtctcatcctcaggcattagaaggcaatatggcttttcctgacactatcctttggggcatacactttgagaaccctgagccaacaggtaagaagttcatctactgaatgaagctgcaatgtggggcaaccacatggagatctcctatagaaacagagagccatgccttaggagccccagcctcaccagcactattggagtctttccaccatcaacaggcagacatgccaaggagtagggttttaggtttttcatcttgcagccttctttccagtggaagacacgtaaggagagaggagctattccccatcaagctctgctgctaatttgtaagcaaagtaattctattgttttaagccactacattttagggcaatttattatgaagatggaataacaggaacataaaacaaaggtatttaactaagagaaagccagcctaatgcaaatgaatcatccctccttaaattttttcctgaaaatgcatatgaggaaaatgccaaaatgggcttactacatttatctttttcccctctgttcatgacataacttaaatcgtggaagtctaccttcagtcggaagtgaagtggatttgaagacctttcaacttggcctccagggaatgttctcctcctcaaagttattgagtcttaagactttgatcaattctgagatagacagcaatgtctcaggtcaagaatgaaatctatttttcagctctgccaaaaaggttcacggcctctagtcacagatatagctggttggggttaatgctcttatcctttggtttggggaggatttatgtcaagatttaggctgattcatctttgagattaataacatgaggatgtaccccaaagaagatctaaccaaaatgcaataatgggaacatcccagtctgaaacctggaaatacctctgcccaattcacagactgtcatttcaaccctttcatactatctaatccaacaatatgtgctgtctttgctcatatatctaattttctatttaataggaagatcctaaggtttctaattagtttgactatgtatattaataacatttaaataccaggaaaaatggcctgtgtgcattgatagactatttaagatccatttagacactggtgacattcataagaaatattacatttccacagcccttaggccagaaaaatttttcccagcccatttgttttcatctctaccctcactccctatttgaagaaggggaaagatggaactttcctatatgagctcatttccagctctagtccttctgttactcacttttctctggccctgttagtctcttgcggttccttaaatagaccaagaatatgttggtttcatgacctttgcacttgctcttctttcagctaggatactctgttggtttgctttctctctctctctctctctctctctctctctctctctctctctctgcaaagagctttctgttgtgtaggaacgaccaggggtttgtgggttactattcatcttggtagaagggaatacttgctacctaattttgggttctcaaaaaccgaaacttgaaacaattatttaaatttattcaggaggggacctcagaaaatttcagtaggacaatagaaaaatgaaaaagggaaaggaaatcagccaatgaaatgtgtgttatcaagccagttcccaccatgggcaaccaggacttactcccacttggaaactctgagcacagttatcctacacaaggagtaaagaagctgaagtgtttatttaccataggttgagggctcctcccagcatttctgcccaggcagagcaacctctggaaggcagagaaagaaggcagagaaagagaccaagggtcagggaggagtagctgctagcacagaaatcaggccagtgtgcaaagaaatgctgagtgtcatatggagaggacacaaacagcatctaccagggcaccgctgggaactatttgtaaaagtactatgccagtttaaaagactagtgattatgtatatttggtgtaaaaaagtccaggcttcctggaagagctgtcatttgatgtgaatcttaatagatgctttcgcttcccatcagaaaccatgaggtttctcccataagggaggccaagagtctagaaaaggtctttccagtcagaacaaagagaaggaagaaagcgggggctctctgggaagcagggactctctggttctccagacacaagtggaaagcgctgctcatcactagcagaaacagcaacctgtagataggttaacagggagaaatatttttatttaaaaagatgctaaaaaatcttaaaggaattaattaggcaatataacaaaaataaaagaaacaaaatgagggcaaagtatgaagagatatttcactgaagaaaatatacgaatggcaaatacgcatataaaatgttcaacatcattaaccattaggaaaactcaaatgaagaccataatgaggtatcactacacacctattggaacaactgaaactttaaggtaatgatagtacaaaatgctggtgaggatgtagaaaaactgggcctctcatacatcgctggtgggaatgtaagatggtacagcaactcagaaaaattgcttggcaatttctttaccaaaaaaaggcaactaagtatatactcactatacaacccagcaattgcattcctgggcatttatcacataaaaatgaaaacttatgtctgtacaaaaacctagatgtgattgttcatatcagttttatttgtaatatccaaaaatcagaagcaatcaaaatgtccctcgagaagtaaatggttaaacaagctgtggaatatcatactgtgaaatattccttagtaacaaaaaaaagtcaactattgatccaagcaacaacctggctggttctcaagggcattatgctaagtttttaaaaagccaatctgaaaaggctacatattatattattccattcgtataatattatcagaaaggcaagactgtagagatagaaaacagattagtggttaccaggcattagaaatggtgtagaggagggagttgagtatgactacaaacacacagcataagagagttctttttggtagtggaatagttctgtatctacatcatgtggttgttatgaaaatctacccatgtgattaaaatgatatagaactatacgtgcacattgtagcagtgtccatatcttggttttgctattcatacatatttttgatatctatatattttttgagatagatagatggatacgtagatagacagatagatagatagatgatagatagatagatagatagatagatagatagatagatagatgatagatagcttgtttggaggttctagcatgggagcggaggtactcgtatgcccttgactgaagactggtcctcctctgtcggggatggtcatcctctttgacagagcatgcagctttgggagggatgcatatggagcagtgagggaggaaggggacacccgtctaaccagtcagatcagccgaatcaaccctggtgatcaatggggtgacagatgccgcagccagattgccctcacatcagatagatgatagatagatagatggatagatagatagatagatgatagatagatagatagatagatagatagatgtaatgatgtaaaatgtaaccactcagaaaaactgagtgaagcctacatgcatgcaacctctctgtgccatctttgtaacctcttgtgaggctataattatttcaaaataaaagggttgaaaaaatactaaggatcttcagccagttcacacagtcaaatctgaaagtgaacagcattgcttggacatgattgtaaattttctactcttgttattgaatagaaaggaagtttcccagagggcacattaggaaggtagagcctgctggatcttcagaaattgtcccctcgtaagcagcacctggatcaggaaacagacacttatccttttctgccattgtcccccatccctataagggtcaccactgtccttacttcaaaccacataggtacattttgagtattagtgtgttttatatagatgaaccaatatagtttttaatgagaattctagttcttttcaatgtaactattacatttttgcataaaacagtgaatcttcctcctcagcttaaacccataacttaaaaaaaggaaccaagtcacctactccaggattaggtattgattcatttacactcaatgatgtaaaagtaatttgcatcgtcaacttctacctaagtatacctccctagggctgagaaaaggaggaagaggatcaggccaatgtgggatggaggagggggatattctgtaaagctaaattccagaaataactctcaaatcagtgaaactctactttttgacataattatgtgtgaagtatggttacttgtaccttcactttttcagttcagcgatgggaagtgaatcgctgaagatgttttgattgtctaaacaagatccaatttcaagctaatctgggtaatgtgtgtattctacatgcagacataatttctttttgagaaatgactactaaaggaagttccttaaattgacaggaaaaaaaatgttcagtgtatctctcaaagggaaatgggggctaatggtggggtcccttgtctgactcagtgacctggggttgtaaatgcccttcattaggcctccttagctttcactgggtctaaacataattcattgagatgaaagatctcaaaagatctttatttttctgaaggttgttgccttctggcagaaaagattccttcctttggagcaagtttgttttacaggaataaagaataacaggaagttgtactcaaggtatacacctatatgcgatagcctgtacatcaggcagataagcttctagttgaatgttaaccatgaaatcaaaacatctttggtaagtcacttcctctccctatccccacagcactcatgttataaataaacacatttgtatataactgttgaaaaaaagtaccccaatgccaactctacattttgattttaatttttagattatccatttggtgtgatatataaaataattagtactttccttttgttactttcagcttctttaaaaacctgtagtgccttaatatattgcatctattgcccagaatataattttgaatactcccttccccaccatgttggaaaatcaatgttttaaatctacctttgagtgacatattctatgcagttgacaaatctagcttcctgtctttgcattttccttttctttttccctttggtattttagggtaagttgaatgccagcaagcaaaataaaataccatagtaatggattaattaatactaaacttgcttcattatcaagtagatggccaggagtacatcttgtgcaacacaaagaataatcttgtataacacaaagaaaaacagtcatgtagaatacattttttttctcattgcttatcaagggaaagaatctacttccaaaaaagaaaaggaaaatcaatgtcagttctgctttttactgctgtattttaattgcaccagtggtaaaaatgagttggccttttaggaccattgatttcatttggatgcatttattgtacataatattagctgcctcctaaatttcaataaaagcgatagtcaatgagatggatctgtgtgattcaaaatgttttccaattaagaaaacatggcagtagttgttactattgttactattatgactattatatatttattactttgtgagaaaaaaataaataaatccaacgccttctccaagttcaacacctgcttctctctaatggagctctaagaaaaattgagactccctataagaatgaaggaacctgggaaaatagtcacataaaacccaagatgctttcaggacacatgtttgattaaatgcagaaataaacattccgagtgaattattggtttggattgaaaaagatgtcaatgattcaattttgtttctgtccagtagatttggagaatatatactttgttcctctgttttcagtcgagttaaaaatatttgagaccaggcattgtgtctcaggcctgtaatcccagcactttgggaggccaaggtgggagaatcacttgagcccaggagtttgaaggctgcctgggcaacttagcaagaccctgactctacaaaaaaaaaaatgtgaaaaatttagctgggtgttggtgctgcctgccagtagtctcagctatttgggaggctgagctgggaggatagcctgagcttagaattttgaggctgcattgagcaatgattgtgtcactgcactccagcctgggcaacaagagaaaccttgtctcttaaaaaaaaacaactgtatgtatctacacacacacacacacacacacacacacacacacacacacatatataagtttcatcatgcactttgtgattcgtttgactgatattctggtttttattaagttcaaacaacatttccaaaggggtttgcatttttataagcaactaaagactgaagaaaagttttatgttaatgtggctaccactgaaaagtgtgtgtgtgtgtgtgtgtgtgtgtgtgtgtgtgtgtgtaaaatagggtgatttatgtgtaggaaatttttaataagggaaaactagtgtatttttagagaacttcagagttaggcctcagggctctgtctcaaagtacagtttcaaaaactttatcttaatcctttagatcttatagcttatttacactacttaagaacatttttctttccttatgcagagctgtgggaacaaaagaaccaccaccacaataaaaatagttgaattcagagatgccttttctggtgttcaaagaagaaaactgtaacctgtccacatggcctgaaagcctatgagctttacacaaaactgctgcattttgaggtttcttgaaagagttattaatgttttgataactttttaacttccccgttttcctgcactacaccctttattattggactatgctatttagtgacatgaaaggaaatcgaagtcttgagcttcgtgacacagagcttggtttaaaatagctcttctacttttaaactgtatgtacaggtttatcttatttttgacaaggttttgcaaacattcttgatactatttgactttgtgacattggatttgaagtctttcttctggaggttatgttaggacagtacacaatatgtgaaactgagcttaagattttattccccagccttttattatactgtaagtgttcttaacatttaaacacatttcataatctaaatctaagctttttttgagttagcatgatatttctttactaagtttatcaccaaaccatatgtcaaaaaaattcttttaattttttcctctagaattacaatgttccaactcaaggagaatgctgctttttgatgaaggaatttggaaatagaatattgaccattactcattttatggggatagttcattaactgcttaatagtgccaataattctttgtgcataaggacctctttttaaagagaaatcaattgagtgtcttgtacatgataatgttataccttaatattcattgattaataaactgaaagatgacaaaaagatattattcaatgtattcaacaaaacaatttgtgtcttattgatcacaaaagtatattttggaaacctaacatacaagcattattatttattcatttcacaaataatgtggtattcaagtacttgcaattcttagtaatgattttttagtcccctggagacccacggcttcatctccacaattttacaaagtctgatttatttaactaatatatgtatatatgctcatacatatttaaaggatatactcacaaatgtagagagatagatgaaggcagacttaatgttcccctcagcttgactaaactttagacatgtttctttctgaccatagatccctgacttcccttttcttagagcactcactttagaaaacttgtaattgcaaattgtttctttacccctttgaaatgtatataaatcttttttaaagcctctttgcagtataaagacccagggaatgtcttcctcaaggacctgggagctattcttcagaaatagaagcatcaaggaagatcatgcccttatctcccagtctctgtgggaggataggagcctaaattcagccttgttccaaccctgtaaaattatctcctgtcatgaagatacaagaaaatttacttttcatttggaaaacacttagcaaacacaggtggcctacaatcccttatcccaactcttaaaaactctcaacccttttctcagctgagttgggtgctggcctctctcccctattgcaataggcttaaataaaatctttcgttcttgtttaacttattctggtgtaaattttttgacaaaatataccacaagagaaacagccgaatcagtgacagtttcttcttgtcagtaagtaagaaagctgtaactctctcacacagacctcaaagactactgggctttatttgcggtttcttgaaagagttattaatgtttcagttacttcaacttttcttttccctttccctctttattatataaacatatacagtgtgttatatataatcattatataatatataataatgtttatataataatatacattattaaattatataacataatgttatgctataatataatatgtaatatattattataatatattataaataacataatttataatttgttatttagcctattatataatataatgtatatgctatattataaagggtgaaaggggaaagaaaagttgaaatttcaccctttattatataacatatgcatacaactgattctcattattcacagtagttttgttctataaagtcactgcaaagaccgaatcaacaaatagtgaaccattgctcctagggaaaatacacgattaggtttctgagagtctctggtcacaacattttcaccaacctaccaatacataactttgctttgtgtgtttttctgttgaaagacaccttatttaacatacattgttgcttcattaacattgaactcacagtctacagcgctataactcaggcctaagcgaagcttatctaacacacatatgttctccataaggcacgtcacagttttcttgcacttagaaacacttcagcagtatgcctgggatccattttaaacagcaaaagtaccaacaaaaaagcacaaaaatgtgaaaaagatagtaataaatacaccacaaaaaaggtccttgtttacagtatgaaagctgaaagaagaaggcagagcagcgctttgttcatcctccactggaaatgtgtgcattgagctatgctaattttttttagatggagtctggctctgtcgcccaggctggagtgaagtggcgcgatctcggctcactgcaagctccacctgccgggttcacgccattctctcgactcagcctccagagtagctgggactacaggcgcccgccaccacacccggctattttttttgtatttttagtagagacgaggtttcaccgtgttagccaggatggtctcgatctcctgacctcgtgatccgccccctcggcctcccaaagtgctgggattacaggcatgaaccaccgcgcccggccgagctacgctaattttttgcctttctgtgcatgttcacaaaagactaaaaaaattctataagtactgatttgggattacaaataaatattaccagtcaaattaaaaaatgtgggctctgtaagtaatgatgatcaactgtgtatatgcacatgaagcatatatatgtgtacgtatatacatttgttatatattattttatgttaaaagatgtgtatccacacatatatttgttataaatttatatatgttatatatcgttagtttttcgtgtgtgtgtatatatatacggagagagagagagagaaaggagagagagagagagccagattgcctcatgattctgctcttctgactaatctaaaccctaactgaaccagggtgcaggtgtgtatttaaaaacatcattttgagaagggcttctaggcttcaccagtccaccagtggggaccatgtctccaacaatcccctgctctagggcatatggtcaacttctccaaatatgcccaaacttttcttatcttatttgtctagaatccatcccagtatacaacatgttatgtctgctatgttattatagacatagacatatccaaaatggggtgagccacttagttaagaagaaataaatggcttactaccactctcagtcagaaggaaaacagctaggggccttgaagagtcagctggttggtgaaagaatgaggatctactacgtattcccttcaaaccagtcagaaccccaagccaattacactaccctcttcaaagccctataacacaaatgttttcgatttccaggcgcagtaataataattaattacttattcataagaaatgcaaatcttctgattccttctttaaatatcttaaatgtcaagtagcaggtggttttcaattcagtaaacaaactgcatttgcttggatagatgcgaacagtgccacagctacatttacatctctcctggctgagtgaatgcttctatatcttctaactttgttaagccagatatagacaatattgaaaagcaggttccaaagttatcttgcaaaggcaccagaaggccatatcagcttctatatatctttgatagtaatgacaaacacagtgatggacttttctagaaagctaaacaaaagagtaacttttttagagaaatgggacatgaaaacaaggcaatgtgtgatccagaattggatcctggacaggaaaaaaaaagttagtgtaaagggcatttttataaaaatgaacaaaatcacgtcctttgcagcaacttggatgcagctggaggccattatcctaagcgaattaacacagaaacggaaaaacccaacaccacatgttctcacttacaatgggagctaaacattgggtacacagggacacaagatgggaacaataaacactggggattccaaaagcggggagggagggagagagggaggaaagggctgaaaaactatgcaaacagtattatgctcactccttgggtgatgggatcaattctaccccaaacctcagtgtcacacaatatacctatgtaacaaacttgcactcctgaatctaaactaaaagttgaaatgtttaaaaagagtgtgattgattggagtaatttaaataatatctgttgatagaatattagtattatatcaatattaaaccccttgaatttgataatgtactgtggttatggaaatgaatagccttgatcctgggaaacacacactgaagaattacaggtaaatgggcataatttctgcaacgtgttcgcagtggttcggaaaaaacgtgtgtgtgtgtgtgtgtgtgtgtgtgtgtgtgtgtaaagggagagacagtaatacaacaaatgtggcaaagttttaacaattggtgaatctggatgaatggtatgtgaaatgcctttgtattagtcttgcaagtttcctgtaagtttgtaattacataaaaattgcaaagtaaaaaaccagtacctctactttataaaaatacaggcataactgaaaatgccttcagtattacatgctaatttactacttagtagttccaatcatcaagagcagccattattatctccaagctctaaaaaaaaaaataaaaagatacagtaattacctgcctcccagctgaacttcaagcctgccctttattctcacaataacagataagtcttatctcgctttctctgtctctgtctctgtctctctctctctctccccctctctaagtagtgtcaggacctttccatgttctctttccacatggactaaactgggcttcctcacaacatggtggcctcaaggcagctgaattgttcaaatggtggcttaggaatctcagaagctgtcctgagaatcacgtctacatggccttttataaaacagcttcagaaatccacagagtttcttctaacacagtcagaagcctgcccagtttaaggggacaaaatatagacaccacttgccatgggcgatggtcagaatgtttgtgtcccctccaaattcataggttgaaacctaactaccaatgtgatggtgttaggaactggggctttgtgggggtgattagatcataagggcttgggaacaatgcccttaaaaaagaggccccagagagctgccttgccccttctaccatgtgaaaagacagagagaagccactgtctaggtatcaggaaatagactctccccagacattgaatttgttgatgccttgatcttggacttctcagacttcagaactgtgaaaagtaaatttctgttgtttataagctacccagtttatgacattttgttgtagaagtccaaacgagctaggaccaccacattttgatggcaggatagtcaaacttacattttaagaagaacatgtgagatgagagatcttgttatagtcaatttgaaactacaatctgtcacatctttctaatatacatttgtaaaatcagatcatcatgaatgacctcatatgaacatctattcctagattatttgtagtctcaaggcctgtggagagacagacttatccaataacagagagcgcccaaatcaatgcttttggtctgtttcgtgtctacagtttctaaatgtcttgtctatatatcatactctttctgagtaaaaaattacacatgcatgctccaaatcactgcaggtatccttggataacacaagccttctaggatagtggtgcgagaccagatggagtcagtgtcttaattgggagtgctcttgaaagcagagcctgagacagggcttcggtacaagtagtttatcgggaagttctctcaaagatcaggagtgagggcaacacagaatgtaacagagatgggaggaaattcaatccaacaatccattatggagttgtaaatgagcttgttgtaaatgaagatcagtggagagaaataatgatccatcaccttctttcccaattaggtaagggttgccccagtgggtgcagacagcccccatgcttccatgttaggcccaaacagtcctgggcatacatcaaaagatgaaaacaagtggcatgaggttgataaaaacagctgtatcataggtgagtctgaaagagtgggaagtagggctcagagacatccagagcactcataattgctaaataatccatttcacatcctcagcaagaaaagcctattttcctttgtgtcaaaaaatcgtcacaaaatattaacaattgtatttaatacattaacaattttgaggtgctgagagcctgttatgaaattttcagatgttttgtgagccagttaaacaaaaccattattaaaattaaattacctaaacttgccattaaatagattatattaaaacaaagttaaacataatttatcctttgtaattatttcactacattaattattctgtatggtcttggtattagttatgtcttttgcatctgtatggtgaaaatactacataacgtgccctcccacctatcttttctcaactctgtgttgcacatcggtgatgtcgcataggtaatgtgaaaccagccatggtgggagtgtttacatgacagaaatcagtaaacactacaaatcaaggcttttatcttttttgtttgtttgtttgtttgagagcaggtctttaaacatttcccaatacagcaacaatcattttcacttttgtccttttcattccttctacttcctgttgaatcctgtcttctcctctcacccccattctggtaatgtcatgtttatgttcattgcctcaaaaaaatggaagatacactaaaaggagaggaataacaactgttttccaggcttttgagttgtgaaaggttaggccctctgggaagaaagcaagctcatatacacagataataaaatagatttttgagaaggtaagatttagataagtaaagtttgctggcttaccctcccctcaaacaaaataaaggacttggggagaagaacgggcatgggggtggctccctaagaaaggaaaacaataagaccttaggcacacctccttgggacaagactgattgaaaaccaggataggtttggaagaatgaagtaagggttaagcctcctttggtgaaattccaagcagtcaggaagactgtgggttagaaatagaagcagattatgtctagccagttggccttcatcaacttgaccaagtccctgccttcaaccccatgtggcatagggatgttgaatatctcctgcagaccaggatgacatgacaatgcgagaaagaccctcatctgggatcttgcaacagaactttaggattatgcaccagtaatctgtaggaccaaggacagagagccatgtgaaggatggctcacaaagatcaatgtgacagaggaatgcataccccggatccaatgccatgcaaaccatgacacagtgaatacctcagagctaaacatccagccctgggcaaacatgtggagaccctgaattaactgaaattaaattatactttattgtggcatagggtcttataatagaaattaactagagttgcagaaaataaagacagctgaattcttatgcactcgagtttgtgagcttggattggtaccggctgaccttgactggatgggaaaccgagtttggaaaaagtacctattttaagtgttctttttgagttcattttaccatttgccatatgaggaacaggtatatgcctgttgcttccaagggccaggttgataataggttgtattaattgacctagaggttatgccagtgaggggtgcctatatgctaaagggactttcaagggacagaattttggaaaaatgaaagtgcattacaactttctcatgtcttgtctaacatccaggaatcattctcatgccaggataatgtctatcccagacaccaacatactgaaagaaacctacattttttccctctctctaacttctgtgaaatattgtattattttacagatattcattgccaatctgtgagagaggattctgtttgcctactgggttgacacctgacttggccacatgacttgctctaccaaagaaatgtgagagaagtgatgtgcttatgtttcctttgccatcatgaccagcaatgctccaggttttagaacactgatgcaaaaatgactgtcacttctcacttctccctttgtaatatgattctatagcaacttccaccaaatttggagatatggagatcgctgtccctagaagctgggctagcctgagacatgatttggtcaatagaatgtggtagaagcagtaatgtgcctttttgttaactaatttgcaggagggtttacactcttccattcactgttttggaattctgataccatcgtgtaattcagcacgggttagctgaaagaggagagaccagtggaccagggatgcattgtcttagctgaggtcatcctagaccagcctatgccagtccatccccaaataggtgagtgagccaagctgagctcagccaagccaggcccagatcagcagaactttccagctgccatgtagactcacgagaaaaaaataaatgtttattcctgagtgctgctgaagtttcatggtggtttggaattacaggattaatgtggcaagaaataactaatacacagattgaagctgctctgttggcctgcacctggagtacagaagatgtaggacagagctacagcaagcaggcacaaggcacaaagcattaacaagaaagaaacattcatgtaagccactgagatatggagtctatttgttacccagagtaacctagcccatagtgactgatataccaactgacatgcctaactgtgcttgattcctcaatttctcatttctttttttctcgctggttgatttcttttctatgctttctatttcatagaaactgcggttgcacagatctcctgtgacatggacatgcaacctcttctttcttggttattcatcctgaattttccctgactttggtcctatttctttaatttttttaaattttaatttttttaagcgatgaggtctcactatgttgcccagactggagtgcagtggtgcaatggtgaaatcacagctcactgcagactcgaactcctgggttcaagtgatcctcccacctcagcctcccaaagtgctgggattacaggaatgagccaccacatctggcccctgaccttagtgttaagattcatttctttcccttatattcgaggatcctgggaccaaaagactgggttttgttgaattagaaattttttcgctttgcttgatgacgagagtctgcaagacaaaggctaaggttatatttttgcgggtcatttgcagattacttttagaatttacttacttttatgtttattcacaagatcatttaaggtatagtgtgccaagcagccaacaaagcatgacttttatttttcaggttgctggaaaattgctgaactctcctgcagtattttaaataacaactgaacaacattcaaaacagcccatccatcttctctatagaaatacaggtgctaccagagagcactgtagaagaagctttatttctgtcattcaagacatggttagacattccaacagaaatttttaaaagagattgtcaccccactatatttgttaatgtgaaatgttattattgctttggaaagtctgctttgaccataacacttttctcactctgcctttaaattccaagtaattctagttggagaaagactgtcgtcttctgagttctcctaccaaaactcttcatgcccaggaagatcagatgcaaggttatccgagctaacactaggaggttagctcctagtgctgagaaggccatggatgaacacagaaatgcctctgcttaggaaccattgctgaaggaaacttccacacactaatggtgggtgtggacatgggtacaaccactttggaaagctagcactaaccatgacagttcaacatttgtaacccaccatgactcagcactcttattcctaggtatatatttaatagaaatgtatatatttctttaccaaaaggtgtataatataattttttttagagtcttactgtgccacacaggctggaatgcagtggcacaatcatggctcactgcagcctagaattcctgggctcaagagatcttctctcctctgcttttcaagtagctagaactacaggcatcctccatcatgcctggctaatttttaatttttcttttgtaaagatgaggtctcactttattggacaggcttcttttgaactcctggcctcgagcagtcctttcatctcagcctccaaaagcactgggattataggcatgagccaccacatcccatcctataatagagtatttatagcagcattattcataatagccccaaattggaaactactcaaattcccaacagaagtagaatggaaaaaataaattgtggtatattcatacaacagaatgctacccagcaatgagtatgaataacctacagctatagcaaaccatcatgaatcaatctcacaaatataacattgaggtggaaaaacagatgcaagagtttagactgcatgagttcatttttatgaggtttgaaaataagcaaaactagtctatggtattagaaatcagggtgtttgctacttttagagggtggtgacttggagggggctatgaggagggcctctgtgaggatggtaatgttctgttggctgatctgagtgttggtaacatgggtatgtttccttgtgaaaattctttgaattccagttttttttttttatatattcctctgtatgtgtgttatcctttactagagagttaaggggaaaacaagacaagaaagaaaacaaacaattattccaaagtgttcttttgattataaccctattatgaagtctcctaatatcactgatctctttgatctctttttattgtacatgttccatccaaaattttatactcatttgtgtgtcagccttatatattccaaaaacagtacctagaatatatagacattcaataaatacttttcaaggaaatgaaaggatggatggatggatggatggatggatggatggatggatggatggataaacgaatgtctatgttcccaaatattcagtgagcaacataaggtgagaaactctttctggtcttgctcgccaatgacccacatgtttggcacaatgcctgatacgtcgtgggcccttaatatatattcttattttaaaagacaagaagaaaagaaaggaggaagggagggaggggagggaggaaagtagggaagaaggaagggtagggaagggaagggaagggaagggaagggaagggaagggaagggaaggaagggaagggaagggaaggcaaggcaagacaaggctaggcaaggcaaggcaaggcaagggaaggaaggcaagggaagggaagggaaggaaggcaagggaagggaagcgaaaagggaggaaggagacagaaaggaggtggtgagagggggtgttgcagggccatggtatgtcatttctaccatcctgcctgtagatatttaatggagaattgtgcttttctcaaagtaacttttttgctgttgtagtcattgagcaaaagctcaagtggggaaccacagacagaccaggtgattctcaggtttctgagtgagggggctcaaaccaaatgacttggatactcccctagtgccctgttgcctctccccctaagagatacaccaggcctttgggcctgcctaaagcaccattacacaggctgtatttagcaatcataactttatatcattactgtgtagcccagaatatgccactttggcatgaggattattttgagccaaaggcaattaagaaaaagaagatacaaggaaagctctcttgactccccttatttgcttaaaagcagggcataaatttacaaaagtgtccttcctcccctttctaccaggaaagacaaagcatctgtagatgcttatcaacctagaggtggcaccagaggagtctacagaacaaactttactagttggtctttacctaccagtcatttcccatatacttgccttctcacaatctgccactgttagagactcaaggtccctttcttttgtcttgtcacttctttaaaaatgtattattcttcttcgaagatgtcatataggttggagttctaagccatctcatgagagttactcaatccctgggtatgttccatgtatatatgaaatgaacattcaaaaactgttttgttgttcttgttgttgttaatgtgtcttttgttttaggggtccacagctaagaactcataagggtagagggaaaattatttttcctccactataaatgtaatggctaatagtaccggtgattacattttttcttgtgtcccaggcaccttgacattcttacaagagttccagaagatagttgctagtatcagtccattttagagatgcagaggctgagcacttaggtattttgcctcaggccttacagccaacattgactagagtctgcgtttgaacctaagctcttaacatcctgtattaatcaaccccatccaccagaaaattgccaatttttaccaaggtaagcactttaaccatgatgacaggtaaagtttcttgagcatggcaccaaaggtacaaggcaccaaaccctgttcttaatgctcacatacctcctgtattactactatctgccatactacagataaggaaacagagactttgaggttcagggaaggtcccaaggttatagaacttgcccatgagggacgtagcctggctccagtgcctatgttccccatcattacactatgcttcatcttaaatgctatttcatttaatttgctgcttctcagaactgaaccagcatcagaatcaccaggaaggcttattaaacatattccaagactccatccttatgggtgttaattcagcaggtctgggatgatgctagggatctgcatttctagcaagtgcctagattttgtggaagctgctggtccaaggaccacacttggaggagcagtcatttcatcttcacagcacccctgcacggaagatgctattacttcctcattttaaagaggggcttaaacatcacattatctgcacagtgctttgcacatggtaggtggaaatcagtgcattttgaataaagcaatgacatgatttgcccaagatctcatagcttaatgacactgtgaatatttaaatgtctacttttatttcaggaaaaaaaaacttttaagaacagtccatggagtcaaggctttcaaattctccatctcccacaagatctcgaatagcttcctgactataatgagcaaacaggaattgtgctaagttaaactgaaattagaacatcgcccaagagttaagattcaagtagttagattagattagaaaatatttgttgttttcctcaagtgcctgtttttccctcatctatcacaatttagtttgtcactacaggttgctcttgcatatattttaacagacagaagtaatatttttcatttaatctaaccctggaggccagataaaatgcataacagtttctagttcattcttgtttaacttgaacaatatactaatgtgatcaatatctagttccactttcctcattagtaacaataaaacattgccatccaattatggttcctcagagtaactgaaagcatttaaaaatgtttcactgtgatcaccctcatgtgtaaaaattaggtagacatttctggaaaatgaaaagaaattaatgcactgaggtgggaagtggagacccaccattacaggggctctgagttcatacaacttacaaagttttagggccttcgcatcacttgaaagttgagctgagctctgatgttctcaataatggattcatggaaaatacagttttgtgcattgtctatccaaaactgaccccaacaccttccttatctttctttgcttgaccattctcccaagaccaagggcacggagattggtgctgccctcacttcctttccatcaccctcatcttcataccccaccagctgccatgcactcaagctgcaccacctctgaagcggatgctgttggtgagctcccaggtcctaaggacctttactggttctctgtgcctatctctttgattctgcctgctgtgcttccatagtttcaacctgagagctgcctctgagactcagcattctttcctcccaatgcttgaaaatacgtatcaccctgggtggtctatagtcaatgactgactggtaccgaaggataaaaccccagttgtctcgacttcaaacaaaaccaaagaaagcttatgttcagcctctgtcatcatcacattcattccacccactgccccctcactcttagtagaaacaaagtctttgggccgggcacggtggctcatgcctgtaatcccaacactatgggagagatccccacccgaggtggatggatcatttgaggtcaggagttggagaccagcctagccaacgtggtggaaaccccatctctactaaaaaatccaataattagccgggtatggtggtgcgtgcctttagtcccaactacttgggaggctgaggcaggagaatcacttgcacccggaaggcagaggttgcagtgagccgaggtcgtgccactgcactccagtttatctcctcccaagtacttacatgtgtcctgtgacacaaatgattgaagatatgagatggaaaggccaaaaaaaaaaaaaaaagaggaagccagggctgggcatggtggcttatacctcccaagtagctgggactataggcgcccgccaccatgcctggataattctttgcatttttagtagagatggggtttcaccgtgttagccaggatggtctcgatctcctgacctcatgatccgcccgccttggcctcccaaagtgctgggattacagtcgtgagccaccacacccagccggcacagtgcttttaagcatatggttgatccatatggtggcagtgtcattacttaatttttttaacagttgaataatattccattgtgtggatatataacatttaaaaaatcagtttataaattgatggacatttgggttgtttccactttttggctattgtaaataatggtgcaataaacatttatgtacaaattttcctgtagatgtatgttttcaattcacttgggtttatacctaggagtgaaattgttatgtcgtataataactctatgtttgagttttgaggagctgccaaactgtttttctcaacctggataatctcgactggccaattttcatgttcactgattcttctgccaggtcaaatttgctgttgagcctctccagtcaatatttcatttcaattattgaacttcctcactcatgaattttttgaattatttctataatcctgtctctatttaatgaaacatggcgtgaacccggaaggtggaggttgcagtgagctgagatcgtaccactgcacaccagcctgggtgacagagcaagactctgtctcaaaataaataaataaataaataaaagaaaaaagaaaagaagaaaagaaacgaggtattctccagactttccctccatgtgagcaagtgagttcatctacatgcagggatctgggagaagagtgtgtgagtcacgtgatgctgagggtatggtccagaggaagctggtgcagtggtgcagcaggtgcagatctgacaaggttaaagctccaggaaaatgaacagtgaggtacaaagagatggaagaatcttggatttgattgacaatgcttggtgagaagacaggctaccataggaggacgctgcagttccactgaatgagcttcctaaaccagaacaagacaatgttggctcccagaatctgccaaagaacaagaaatgaagtgtacagacttaaccttacagcacctccatgagaacattcccctcactggaaactgacacttggctcctttctcatgcatggattttttaaaaaatatatagatacaaaatgttctatttccatctgctaattcaaatctttgagtaataaatcaacactaaaaaatgtacacttatttaatttgtggccgctacaggcaacatgaaaatatttacagaatgaaaagctgagatttctcaggagtgcagaatatttggctctataaatctaaaactcttcattgagtagcttgtaattggatatgattggttaaacatttgcctttaactctgattttgctttactgtcaaaatttatctcctcccaagtacttatatgtgtcctgtgacacaaatgattgaaggtatgagatggaaaggcaaaaaaaagaggaagccagagctggtcatggtggcttacacctgtaatcccagcactttgggaggccaaggagggtggatcacctgaggtcaggagttcgagaccagcctggccaatatgacaaaaccctgtctctaataaaaatataaaaaattagccaggcatgatcgggtgggggaggtgcctgtaatcccagctacttgggaggctaaggcatgagaattgcttgaacctgggaggcggaaattgcagtgaacagagatcatgccactgcactccaggctgggtgacagagcaagactctgtcaaaaaaaaaaaaaaaaaaaaaaaaaaaaaggaagccagaagccagacataggagtgttagagtgttattaacattccgtagtatagaacttgcccatgcgccaagtagtccggctccaaagcctgtgtccctaatcattacactatgcagcatcttaaatgccatctcatttaatgtggtgcttctcagacttgaacctgcagcagaaccaccaggagggcttattaaaaaacataagccctcagcaaaaagcattctgagtgggtttagcctatagatgttatggatatgtagatatcccattcactgattactggcattcctaggattcttcatggtattttcaaacttgggataaatctgtgaattaaaaaattatctgacagttacccctgttctccctacaatgtccattggtgctgctggaaagcacgtctggctagatagactgctagttttatccattaatggcatttcttattttctcaaagccctttcagataaaaacaaaccaccatgcaatcagtatttacttatatatttgtataagaacctgtattttgcaaaacacatctgtgtatatttatttcctgaaattacttgcctctgttaatcagtgtctttcatgttctctatccaaattgtaaactctgggaagaagccatggcttatatttctgtatcctttatttaaaaactaaaaacactgaataattgaaatctcttctcaaaacaaacaaactctgaactgtaatttgtgctccagagctccttgtgtgaccaagctaaggctggcacttgccctgaaagcacagtcttgcttggcctctcctccttccatgtcctgcttgctccacaaccttactgacttctgggagcaatgctctgataattagttgcccgtgtagcctcaccttagggcccgcttctagagaactaaacctcagacagtctctcttgagtgacagtctctcttaagtgcccacctttccattcccaaagctactatcttggttcactccttatggtataagcaattctcctagtcattgtgccccttccatctagtgcactgtcagacaacctcctaatgcatgtctctgatcacaccacatctccaatcaaaatccagcaatggttcctcatttgctgtggaatttaggaaagactccttggcctggaatttaaagccttccgtaccataactccaagctaccaatttgttggtttttttttttttgagacagtcttgctctgtcaccaggctggagtgcagtggatctcggctcactgcaacctccgcctcctgtgttcaagcaattctcctgactcagcttcctgagtagctgggactacaggtgtacgccaccacgcccagctagcttttgtatttttggtagagacagggtttcaccatgttggccaggatggtcttgatctcttgacttcatcatccacaagcctcagcctcccaaagtgctggaattacagacgtgagccaccgctcctggcccaagctaccaatttttaatcattgctcataagttcctaatatcacatggaactcaactctaacaaactcccaccctaccttccctgttcctctgctcaacactgtttcttttatctggaatgtcctcccactttatttaagcaggaaaaccctgcctgtcaatcaagtctctgttcaagtgtcttttctatcatgactactttattgattctcccttttattagtgtcttattgctgccataacaaattactagaaacgtagtgacttaaaacaacacacaattatctcacaattttgtagttagaaattcaggcaggcttggcttgatactctgcttgggatctcacagaagacaaatggaaaagttgttgcccagactagctcttgtctcttggggataaatcgactttaaagcccttttgattagttggtagaatttatttccttccagttgtagtactgaggtccctgaaccctctatcatcaaatccagttgttctgaagcctcaattctctttgacttcctctctgtttcatcttatctgcctccagctgagaatgttctctgttagattaagcccacccagataattcagcataagctccccatctcaaggcctatagccttaatcacgtctgcaaaatctcttttgccatgtcacataacatattcatgggctacatgatttaggatgtggacatctttgaggggccattatgcctaccatgtatcccccgccataaagatgatcttattctactctgaaatcctatggaccatcatatctcctttctagtaattttatttacatataaagtaggaatagctcacttgaatagtgctatgtgccaggcactctttttatatatatatatatatatatactttaagttctagggtacatgtgctcaacttgcaagtttgttacatatgtatacatgtgccatgttggtttgctgcacccattaattagtcatttacattaggtatttctcctaatgctatccctcccccagccccccacgcctgacatgccctggtgtgtgatgttccctgccctgtgtccaagtgttctcattgttcaattcccacctatgagtgagaacatgcagtgtctggttttttgtccttgcgatagtttgctcagaatgatggtttccagcttcatccatgtcccttcaaaggacatgaatgcatcttttttatggctgcatagtattccatggtatatatggtgccaggcactcttttaagcattttacatatactgcctcacttaatcttcataacaatcctatgtggtcagagttagtactgttactatctccattttatggatgagaaaactgcaacagaaagttttgtgtcttatatgttaataaatggtagagccaggtatggtaaagatgatgtcatgtttaactaaattgtttaattttccttccagttgccacaggaagattttatttccagctgcccttcatcagtcacgtgactgattctggccaatggaatgtggccagaagtgatgaaggtcacttatctggcctaatcactgctttctgaagcatggttttttattcactctctctctttctccctctttctctctctctctctagaagcaaatggccccgagatggcaaagccataccatgaaaagcgactggacctctgagtcacctctttgagcagagagagccagaagatcctcttcactcacactgaacagtggcacgtgggtgaaatcacactgtgctgagtttctggaacctcaggaatctttggtacagcaaagatgatactttgattaatacgccaaactccaagcttagaaaatctggatgtacagcctgtgttcttaattgcaatgttattttttctcttccttcttccttttctgaataataatacttctaagattgctgaataaatccgatattgattgagataatataagtgtggtaactataatgcgtttgtagcatacctggtattgtggtgactcagacacttgcattcttagtctaggaggctggggtctaggtgtcattttcgtttccaccttctgctatactcagtgcattgtttaacatacaggaagtaaacacttgctgaattcaacgtagaaaattggaattttcaaataaattagttataaaaatctatttcaagaaaagtattcagtgtactaaaagaaaaaaggtaacctctttcaaacattaagaacgcaacctattgacactgaacgtacacacgctgaagggttcttacctgactgttgacacatgtcaggtggtaactccttgtaacaagtttattaggaaaaaactatgttacattagaaatatcaaaatgcattaaagacctgtgataaagtggctcacttaagggtagctgtggttattttaccccaatgtcctctccaaacagtgaaataatgtctctttctctaacactcaaggtcaaaacagagggaagcctctttttctctaccacgagaacattcaaatataacatgtatcactttggattttaaatcaatttgcatatgatctggtaagatttatttggcaggaaaatcagaggagacaagtaggattgctgaactaattccactcaaacgtccctgacttaaaactgcagattctcagaaggaccaagaaatggacataaaaccaaagtaacaaaaatgcaaactgtttattataataccaaatgtcagaatgctgacacaggtatatcctggaactagcctcaaagtaatatgattctaaaaggattctaaaatctctaaaataaaaagaaaaaccttttttttttttttttttctatttggcctatgctctctttctgttgtcctggaatgtaaaactcttttacaattatatttataaaatatgttctcatacaaatatttctatatatctatgaatatatttataattgaatgtttatatttataaatgtacatgctataacagattgccaagttataaagatttgcatagatgtttgtctatcatgatgatgatgaatgcttttgtctccagccttccgcgcttccctgaggtctagacccaaattttcactctgcagcggacctctcccaggtatcctggaaagtatattagattctaatagtcctaaatcaatttcatctttttctccccaaaatgtactctccgaagatagtcctgatctggttgatagcattgtcatctatcaaccaccataagcagcctgatcttaacaagatatctagaagttgtcctctgtttctcctttatcctacactcaaatagttgccagagcctgtggaatccacctcaaaaatatctcttcaaactgttcactcatcccttcagaaactgcttgttgagttttactaggttgctgtcttggggtgtttatgtgcagattacatgatagtgagaaaagccaggaaaaaaaaaaacaacaacaaaaaacaagaacagggaagaaacaaaggaaaaaagaaagaaggaaggaaagaggaagaaaggaagaaggaaagaaaagggaggagagagggaggaagaaaggaaattgggaaaggagatgggattattcagacatatgctatgaaggaaattaaacagtgatataatggaatctgaaaaggtaagtggaatctacatcagaaaggaaagagaagacaggccactctgaacaaatgatgtctgaactgagaccagaatgatgaaaacaaacagaagttaacttctttaaaacattaagaaagcatcctattgacaccaaatatacacatgctgaagggatgtgtcaataaaatagccataggatacagagcagaagagagttctaggcagggggagaaaagctcagaggaggacgtggctcagtgagttcagggaacaggaaaatcagtggggatggaggacaatggcaaagaaagagagaggtataggataactccaaagaggcaggcaaagccagtgcatgggcagccttccattttatctctattaccaggggaatcactcagagagttttaagcaggaagcaatatggtctgaattatctttttttccaagaatgactctggctgctatctggataatggatgtatatgggaaacaagagtgattacaggagaaagtgggaagcttttgtggccaacaagcctaggaatggtattggcttagactagaattgctgcagcagatgtcatgaaccattgtcagatttggcacattcttgtacagaaagctgacagtacctgctaatgcaatcatgtgtggggaggagggagagcacatggagggtgttgaaagagaaaaagaaggatcaaagatggcttcttcgtttggggctggagtgaatgttctctcccatcacctgctttggttaaggttctttatgactctatcctggacaaaatcccattagtgtcctggtttccacttctttcagtctcctattctccctacctactccttgttcaaaactgtcctcctgattttcctgtaagtctcagaatcatctccctggaaaactagatctgtcaagctctagttaggaaaaaagaatctacactaagtattgtcagagaggatttaataaaggaaacttttgtaaccagattagaaagcagaaagagcacaacgggggcactgagctaaaaccagatattagcagtttcaaggttattgccaattctaaggttgaggtaattcagagaatatctgaagaatgcagttactactctgaaggctgagataaacacagggaaaagtgaggagctcattaccctggaacttgaagaggctcctaaatttcattgattccggccttgttgtttcttaacccatcagtttttttagaaccgagtcacctttgcacatgtcatttactctatttgcaatttcacttcccttgcccaggaaacagctctgaaaagccaccctcaatttctcaaagcaaagtaaatcacaccctcttctctgacagctttgtacttccatagctgtatgtcaacatgcatcatattggattgtcatgtatctatttatggagctttcttacccagaggtccatgatttcttgcagataagaattatgtcttgacaacttctcagtgctcttctggagatgtttgttgaatcaataaacatcaatcatctctgctgcatatggcacctcaccttcaacaggctaccctgggcatagtgactgagcaggtcccaagaccacctgaaggctatgcttagactcattcaccatcatttctgttgcaatcagttggccaacacaaatcacaaggccagacaaaactcagtaatatccaccagcaaactacaggatttgtgttgatatttatacaactttttgaggttcaaattgaagtacaagattaaatactactcacctcaaaatttatacaaaacagatgcacagtaaatggtggccattttacatgtaagacacttttattagtcagtttttgtgccattaaagaaaaacactcctaaacttagtgattagcccagcattctatggattgacaattttggctgggctcagcagggtggtgtttcttctggtctcaccctcctcactcatgcatctctaatcagctgtgggtgggtcggggctggctagtctggggtagcccatctctgctccatgtggcacctcaccttcaacaggctagcctgggcatagtgactggacaggtgtcaagaccacttgaaggttatgcttagactatttcaccatcatttctgttgcaatcttttggagaacacaaatcacaaggccagacaaaactcaaaaggtggggaaatagattatatcttttgattggaggagattcagtcctgatgatggtgtgccagtttcaagccttagcttcaagaagatgtacacatatctgctttctcacccttgaaactttgctgccaccataactgaaagtctgcgctaacctgtgaggagatgagtgaccacatggaagagagtccagttatcacagctgagatcatcccagactagtctacagcctgccaacccttaaacatgaaggagaattcagcaaagaccagcagagctgctgcgtcacccatggctaaccccagacacgtcagtgagctgagccaagaacagaagagtaataataaattcactgagtctgggggtggtttgttatgtgtcaataactaactgatagaatgagtttattatcatcctgctgtaatactaatctctatcttgacccaaagcaatttttgagggttttttttttcatttattgttgaagatgtttccttgagtgacttctcatttgtacatgttttctttcttcttcttcttcttttttttctttttttttgagacagggtctcactctgttgcccaggctggagtgcagtggtgtaatcttggctcactgcaacttccatctcccaggttcaagagattctcctgcctcagcctcccaagtagctgggattataggcacccaccaccatgcctggccagtttttgtgttttagtagaggtggggttttgccatgctggccaggctggtcttgaactcctgacttcaagtgatctgccttcctcggcctctcaaagtgctgggattacaggcgtgagccatggtgtccagccagtttctttctttctttctcagtcttccaatatccagtggtaaatttttgcattcatgaccgggaccataaatacatacggccaatggccagggtcagttatgttacctgtcttcaacagagtgagtggatagagcacagcctccacaatcagacaaatccaggtttaatcctggttctgacactgacagccaatgtatctttgggcaaatttttaaatccttctgatttttggtttccttatctgtaagatgaagataatgatgcaaacctatgaaccccacataatgctgtcctggttgtgtactgtataattccaaattccaccaacggttgttcttcagtatataacctgcatggctggtcatggtagtttggggttgtggtaatggtagttaggttgtttgggtaaatatgagatggcgtgtacacaataggtacttaataatagtagttcttcttacctccatctacaaacttccaaacagaatgttaaaacctgcaacaactgacactccaggctctaacccaggggttggcaaattatggcttatgcatcaaatctggcccagagtctgttcttgtaaatatagttttgttggaacacagccatacccattgtcgctggctgccactcctccagtggcagggctgagtcatatagagcccatttaggtccacaaagtccaaaatatttatgaatatttacagaaaatgtttgcagactcagttctaatgtcctgtgccttaaacttttactgtatgtaagaatcacctggagagcttgtttaaaatgcagattctagggccttgcctagcagagattctgaatcagtacatctgggtgaggcctgagattctgatttacaacaagcacccaagtaaagctgacattgtgggtttagggaccacactttaactagcactgtttttaaccatctgaagtaacttaattacattaaatccttattttttaaatggtaaggtattaatcaattaaaaacccatacaaacacactgcactcactttgtgaaaaagcttaaagttgtgctacaggaattgactaaataatgactgcaggtcattttaagtactatgtgcctcatagataattcatgtttattcataggaggaaaaagttaatctaggccaagtacagtaaccaccagccaacatgagaaatcaaaacacaaaaacaaaataaagactgtatattagactttaattattagcctgtgtacgaaatgaaaaatccatctcaaggttttcttaaattacaaggttttgcttctcctaattgtgccatttgtcttattccctctaaaatatctaatagtggtatactcagtggcaaccacatactccacggctcagaataatttatattttccccactaataacagattgcagatgctctcttgacagtctttaagatttcagaccgattgctaaccagctgcttatgtaagacatactaggtcagattggttgcgatccaattaatattttaaaatcatcctacaatgagcttctagaaattattataattaagctggttgttatgcgcttgcccttccttggtccctaatttaatttccttcggtgatttctttcttctacctatctttctacttccatgcttaaaataaaaagagcaaatcacttccttctaaaatcgtattcatataccctcattttatcttgattatttagatcatcttccttttattagtagaaaaattacatgaatactattttaggtctattttaaatatggaataagcctccgagagcaagaaactcttaaaagactatgggagagttaacagttacatctatgtctggtccaaagatataaagttaaaagaaaatgctagcttctgtaatatgggacctgagaggggaggtgtggaacaaaaacctcacacactccatgtgtagattcaaagatttatgagctgttacaagtaaacacacacccatacactctaatggaattgtctttagatctcataatgtgctcccgaaataaatcccttatgtcaactggggtgttagaatgaagaaaagagaaatctggcttacatccaggttctacctttctctctctcttttttttttcttattttctccctcctttctctaggctccctgttttcctttcttcctccctttcttctttccttccttctatgaaagttgatcagatgaaatcgggtcattcttgtcacggtcatctaaagcagagtcaagaggccagtgaggaaaagcactccgggaacataacattgctctaagactgtaattctgtgcaatcttggctgctaaaactgcctactgtaacctgaaaccagttttatctaatggcttctgaaacaagggggtgcaacacaaagtctagttttacccaccagagtcactcaccagtcagagcttcccagctccccacaaattttaccagtgctaatgaactttctgaaagaggcgtatgtagtgattctcctttttataatataacatttccaacctcctctttgttctgcagacacaccaaagaccaccaaccaggtctgtgtatatgacctgaatttcaattctttctttccaaataaaacattaaatctagaaattcacttgtattaaatacatattttattttgcctttgatcctctcttccttccttcctttctccctcttttttccttccttcctccctccttccctctctccctccctccctttctccttccttctttccttccttccttccttctttccttccttactttctttcttttgctacagctaactcgttggatttttgaggattaaatcaattaaatttaataaaatgtcacggtaaatgcttgataagtattattattattattaccttggtgactataaaacagaatgctgttcattaatccttttgtccttggcatctgctatggtctgaatgtttctgcccccgccaaattcatatgttgaaatcctaatccccaaggtgactaaatgagggggtggggcctttggggaagtgattagaccacagggaagagtcctcatgatatgattcatgcccttataaaagaggcccaagagagctcgttcgcccctcctgccaagtgaggacacaacaagaagttggaacctgaccatgctgacaccttgatcttggacttcccagcttccaggactgtgagaaatacatttccactatttataagccactcctccatttatggtattttgctacagcagcctaagggactaagcatttatctgaccattatgtagaacccaattcttattgactataatctctctgtcctggacatctacatttatattcttttcataatgcaaatagagtttggtttgatgtatgatccagctttttggaatcatctcccaaataaatatttgcctttgaatccttgtctcaaggtctacttttgggagctctcagactaagatatatatttaatgttgagaatgttaaattgaaggaaacatggataaacctaaaattcatagcagaccagactgcctaggaaatagaagagaatctagtggaatgaaacaaacgttaattaactctgagaagcagggcttgaaggcaagaatgggcttgttcaataggtctccttgggcagggaaaagtgggggtggtgtccatcttgatcttactcatggttctgaaatgtaaattagccaccagaggtcacagtgagtgaaaatgtcatcaggacgtttcttagagtactcgtggtactattttccagtttaaaagaacaaaataacaacagcaaaaaaagcagaggatgtgaataggaaactcacaaaagcaaaatgagacgaattaatttatagaagttacgaaaaatacataaacttattataaatttaaatgcctttaaaaacaaatgcccagttctcttactgggactattgaaaattacaaaatcagactgaccctcatactgaaaacaatgtaaaatgctagctaaaatatgaataacatatttttagatgcatgctgacttaataagtaagtgcggacttttcaggggccaaacaccaattgaaaatagtacatcggacaggccagcagacagtcaaggccaacttcaggctaaggacatttgacaagtccaaggaaatttgagatttggtggttctcaaaatctagttgggggatggagctgactgggatcaggagacaaagccagagcttacacacatacaatgcgatccacacagggctatgcccagagcaaagataaatggtggggaggtgggaagctgcctttactgcctatcctccacaaattccccaatgcttcacaccacatggatcagtaagaaaagtggataatctgagaccttagcattgggtgagtcacagcttgttcctttcataagtctgcaacctaattactattacctgtatggtctgaaaagcctcaagctaagaacttggcttaaggctgcatttttggggttagattagctttactaaataaaccctggaggccaggagtttgagaccagactgagcaacatagtgagaacctatctctaaaaacaaacaaacaaacagccagatgcagtggtatactcctgtagtcccagctacttgggatgctgaagcaggaatattgcttgagccccaaaatttgaggttgcagcaatctatgattgggccactgcactccagcctgggtcacagagtgagaccttgtctctacaaaaaatattaattaaaaaaagccctgaaatatcagtggcttaacacaatgcacatttatttatcgctttcaccacattcaacgccacaggttggaaactggaggtggggagtcccccctatcttcattatatggctcataaggcttccctgagcatctacatctacctgtcagtcaggggaaaaaggagtgtgtggagatgtcagaggtaatgtggtagagtgttaaaaatggcccctggtgaatcatgtctccctgtccccatgactccttgcaatatgactttgaagaggtggagtctactttcctatgccttgaatctggattgaacttatgactatcatgggccaatagaatgtggtggaagcaacattacagaacttctctctcaagccttaagtggactggcagcatctacattttccctgttgggctcaaccaccatgttgtaaggatgtccaggcaaacctgctggagaaagaggccaggtagaggccagaggtatgggtcatcacatagagagacaggtcacaaagaggggaataatagcatcccagctcacagtgagcaccaaagatcccatatatggtagagattatcttgggctttccagcccctgccagcttataccataatgcagtcatgtgaggagcccagacaggaccagcaaagtctggctcagtcaactgactgttgaaataaataaacctattgttattttagggcaccaggtcttggggattgtttgtgacacagcaaaagggaactgaaatgggtggtgttcatttggtagtatggattttatattccatgtttggaagtgggtcatcactccattccactcatatttcattgatgagaactcaggcacaaggccacacccaaccccaagagaggctgggaaatgtagtctagctatgcatccaggatgaagaaggaaatgttttggtggacacctatttctactaaagaagtgttcctcgtttgttagttcctacactctaagaataggcagaaacagatagtgtctgagggaatttaccatactccagacttcaaagaattatcataaagctcaaaataaagaagaagagggagacataactctaactattatagctatttcaaaagaacataggaggatgttatccccctaaaattcaaaataagcctattcccatgaagatgatgtatcaacactgactcaacagtaataggaaatctgagtggccttatagccatcaaagataaggaatcagcactttaaagcttctctgcaacaagaatatcagatcctaacagatttgtggacaagttctaacaaacattaggataattcaatattattcatactgttctagagaatagcaaaagaaagaatatttcccaacagtttatgaggttagcatagtcatgacacaagaaccaaacaagatttagggaatggaaatttacagaaaattcttacccatgaacataagtatacaatcctgaaagaaaaattccaaaaattgaattgagcaatatacaaaaagggtgtatcacaaccaatttatatttgtcccaagaatgtgatgctggtttaaaaagttatatatatacacataatatatatgtaacttttaatatattaaatatataaatttattacatataaataataaaatttactgtattctgtattaacaagttaagagtctggtttccagtctaacatgtaaggaacttggaagtcatcactctgtcctaacaatacataacaagttaaactaaaatcaattagttctatcagagaatttaggtcacagggtaaactgctgccctaaaaattggacagacagacagttggatacagagaatcaaaatttaataaagcagagattcacaggttaaaaactctctgtgaggaccagtattggagcaagaaaatctgaactgtaagtgatgaatttttggaggctcattgtggacaagctgagagtttaaaactctgagggggcctaattttgggggacatccatacttttgtgagttttacctcaagtaactctactaggttctcatagtaatgcttaaagttccctctgcttgggccaggcgtggtggctcacgcctgtaatcctagcactttgggaggctgaggcgggcggatcaggaggtcaggagatcaagactatcctggccaacagggtgaaaccccgtctctactaaaaatacaaaaattagctgggtgtgggccgggcgcggtggcgcggtggctcatgcctgtaatcccagcactttggaaggcggaggcgggtggatcacgaggtcaggagatcgagaccatcctggctaacatggtgaaaccccgtctctactaaaaatacaaaaaattagccaggcgtggtggcgggcgcctgcagccccagctactcgggaggctgaggcaggagaatggcgtgaatccgggaggtggagcttgcagtgagccgagatcgcgccactgcgctccagcctgggcgacagagtgagactctgtctcaaaagtaaataaataaataaataaatacattttagttgggtgtggtggcacgtgcctgtaatcacagttactagggaggctgaggcagaagaattgcttgaacctgggaggcggaggttgcggtgagcctagatcatgccaccacactccagcctggcaacagagtgagactccgtatcaaaaaaaaaaaaaaggtttcctctgcttttaacatggggatgggaaaaatagccattttgaaatagatcgctctattcttaacaaggtctgccctcaagataaactattttaccaaagccaaacctatggtggttttaccaaaaccaaacttatctgagagaaggaaaaaatctaactccagtcccctctagccatcctgtcccagctaactaggggaaaaagtgagaagcacttttgggttcacactccagggcacaggcttaaagcaggctgagacctaatcatgggactatagaaccttctacccttctcctctccccaaactttaccacacatcaccaaacacctatttacggtggttccttttaccaaaaacatcatgtctggctatcaagaaaaaattacaaggcacactaaaaggtaaaaaccatagtttgaagagccagaacaagcactgaaacgagagtcagctatggcagggatgttggaattattagatcagcaattttaaacaactgtgatgagtatgctgagagctctaatggaagtagacagcatgcaaaaacagaggagtaatgtaagcagagagttggaaattctaagaaagagtaaaatgggaatggggaagatcaaaaatactataacaggaatgaagaatgacttaataggctcattggtagactggatatgactgaggaaagaatttccaagcttgatgatatgtcaatataaacatccaaaactgaaaagcaaagaaaaaaataccaaaaaaagaggactagaatatccaagaaccctgaagcaactacaaaaattataacaaatgtgtaatgggaatagcagaaggagaataaagagagaaagaaataaaagaaatatttaaagcaataatgcctaagaattttcttcaaattaaagtcagacatgaaaccacagattcaggatgctcagagaacaccaagaaggaaaaatgcccaaaaccacagttaggcatatcatatttaacctgcagaaaatcaaagataaagaagaaaacctttaaagaagccagaggggaaaaaaacttatctatagaggagcaaagagaaaaataacatctgatttatcagaaaccatgcaaataaggagaaataaatggacaaaacatttaagtactgagataaaaaaaaaaagcccaccaacctagaattctgtatcctgcgaaattgatcatcaaaatttaaggagaaacagagacactctcaaacaagtaaaatgagagaatctgtggccagtaggcctcccttgcaagaaatgttaaaaaaaaaaaaaaaaaaaaaaggtggccaggtgtggtggctcatgtctgtaatcccagcactttgagaggctgaggcggatggatcacccgaggtcaggagttcaagaccgtcctggccaacatggtgaaaccccgtctcaactaaaaatacaaaaatcagctgggcatggtagcgtgtgcctgtaatcccagctactcgggaggctagggcaggagaatcgcttgaaccctggaggcagaggttgcagtgagccaggattgcaccactgcactccagcctgggcgacagagcgagactccgtctcaaaacaaaacaaaacaaaacaaaacaaacaaacaaagtttcctcagagaccgggaaaatgatatgggtcagaaagaaagagcattagagaaggtataagtaagggtagaaagaaagattataacaaaaaaaaattaaatcacctcaatacatatacgtatagaaaggatgatacatgaaattaagcttacattcactacctttatttgaaaaaactcttgagcaaattaggaatagaaagaaattatgctaatttgataacaaaaagaaagaaagaaagaaaaagaaagaaagaactacaacagcatctaattttatgtgcagattttaaagagtttcagaacaggaaaaaaaaaataagcctgctattccacctctattcaatattacctagtgaagtaaagtaagaaagagcgctataaagcataaaaattggaaggaaagaaatagagctgtcataattcagagctaatatgattgcctgcagaaatttccccaaaatctataggcatattattagaatgaataacagagtttagccaatttgctggaacaaaatcaatatggaaaatttaattgtatttctataatccctaaatattgtagtatatagaaaacattatgtcaaaaatatttaaagtaaaaggcagtactagcttgtgactttctgtgaaaacagctagatagattatggagtcaatttgaatctatagatctatttaggcagaattgacatcttaacagtattgagtcctctgatccttaaaaatggtatatctattttcttatttaagtctcctataattttcctcagcagtgttttggaggtttcattatacaagttttaagtatttcatattgttatatattatacatggtagatttttccattatattttccagttatttctagtagttttaatcctactatgttattgcagaagtgatattatacatcagtagagatagatcagcacttaacagttatccttattaaaaaaaaaagaaattgaatcctttactacacacacacacacacacatacacacaacacacaaaaacacacacaaaatcctcaatggactaaaaatttgagtgaaaggcaaaacagttctcagagacagcccagaaacctttacttactacattgggataagggagggtttcttaattaagacatggaaagtgcaatcattgaagaaaatgatttttttgttttgttttgaaacggagtctcactctgttgcccaggctggagtgcagtagaacgatctcggctcactgcaagctccgcctcccaggttcacgccattctcctgcctcagcctcccgaagaaagtgatttttatgtccatcatagagaagtgtacagaataggggttagtatatcatactctagagagtaatggctcatctttgaatcctggttctgtcacttaccaccaaaaacttgggctatttttatgctctctgcctctgttccctcaaaagtaaagtggggttgataatagtatccataacatcaagttgagatgagaattaatgagttactataggatagtaagtgttatatataataatgtaaatgtgtatacaataaacattttttaagacagaaacgagagtgaaaagtcaagctaaaaactgtaaggtatttgcaacacataaaactgacccaaaatattagaatatctgtctatctatattcattcatctatccattcatttattcatccactcatccaactattcatccatctattctcttcctgcaactcaaaatgaaaaggcagtgagcaagagacataacaggcatttcccacagaaggaaacaagacttttcgagaaaaatttgtcattgtttaaggaagttaaaggtgacccaacaatgtcactcttaggaatataccctgggagaaaccattacagctttgcctcaagagatttatgcaagaatgtttataacattgcaaacacacacacacacacacacacacacacacacacacagacacacacacacacaaaacagacaaaaatttctggtaaaagtagattggataaataagttgcataattcggcttttagtaaaaatgagcaattgaatatatcaacctggatgaccctcaaaaacatgatattaagccaaaaaaagtaagtcacagaaaaatacaggtagttttattccgttgatataaagtttaaaacattcaatatgaagcaacaggctgtttaggcataaaaatatatgtgataaatgaaaaacaaaggagaatgataaaacagggcatttaagctgattacctctgaggggactggtagggatgggattagaacaagacatgaggcatggggcactacatttccaatagaaatgttctgcctatcaaatctggcagtccaaaagtcagactataaagtgccacagaagtatcagccataacaattataaaaattttagttatagctatttgttataagacagtgattttcagattgttcaagaataaaatttaggagagaactttatgacaacaaataaaaaaagaagttatagagttaaatttaaaattttaattaaaaaataagaaaacaacaaaacaaaattcagctatatggagaagtgtatttcatgaaaatacaaacaacacataaacaacaagcaaataaagaatagcagtataagcactagccaaaataaaatttgagacagaaaggtttaatttgagccaaagggttcattttattttccaaattatttttaaaaacacattgaaaatagtatagtcctgactctaacaattaacaatctaaaaatgcatagttgttttttattattcacgaagtcaataattgtgtttgtctacttgctaaaatgtatttgcaacccctaaaatcaatacttgtacattttcagtcattcactgacaagtacagagcagcaaaaaatgtgcaagtttttgctgtggtcaaactaagcaatgctctaccttcttatttcagttctcatactctaaacaagtgtcttttttgtggtctatttagcacctttttttacatttctgtgcttttttcttattgattaactgtttaaagtggcccccaagattagtgtctcatgcttctaagctcaagaaagcttgaatgtgccctacggagaaactatgtgtgtaagataagctttgttaaggcatgagttatagtgccattggccattcaatattaatgaatcaaaatacatatatatatatatataagataagatgtctttaagcagaagcatatgtaaaacacaattgcatattggttagttgatgaaaatatgaccagtagcttgcaggaacttaatacaacatttcccctaggagcaatgtttcagtgtttgctaattgtgtttgcaccatattaatggtgcataactaccttaaatagggagaatcaactgtgtaaagcacaaatcacaatcatagtaggaaaatttaacatgtctctgagaatcaaaaaatcagttaaataaaatttaattgaaatacagagggtctgaataatatagacaataaacttgttttggcttttggtgttcctctccgcccgaaggaagttctgcagttatctcacataggtgaactctccaacaccgcagacagctggatccttacctctttaccatcaatgtcttttctctagtccaacttagtcacccactccactggtcacatcttaaatattgtcatcatcagaaactgcactatttctgaaatcgtaattttaaacatcttaatctctgtgtaccatctttgctctacctcactcacaaactcataaacccccactgctacaattccttaactcttcagagactgccaaaatatggaccccataacttttttattctctcctgtccaactctatgtccacgacttctcaatgtaatcactcccttgccagtatccccagatctcttttcctctcctggtttccctctaacaaatgatctctcttcaaagctctaattggccagcagcctgtagttttttaggactccaccagagtgtcagttcttctagacagcctttccagataaccctatacaaattgagtgcagcttggtctctgcgtttattcctttcttctttcaaaacacttatagaggcttgtaaatattttagtagacatttgctttttcctcctgtcttttagactacaacataagttccatgagtacagaaatcctgtcttgttctcccttcattcccagtacctaatataaaaccttgcatatattagaagctcaaaggaatggttatctaaatttttaccctataaagaaaatacattatttttaaatgtctatcagtgtaatggctacaaagtttaattgcatatatagatatcaatataaccttaattaattctatcatgtgggaattgtgcgacctacatgctttcaccataccataataaaactaaaaatacaataaggataaaataaccatagctaaatctaactaactggaaatccaaaaaccttgtttttaataattcttggagaggagacaaaagaaaagattaaagagtacaattaaaaacattttataaattaaagaacattatgtatcaaaatcaactgcataagtctaaaattgtcctcagaaaaaagtatagtctaaaatgctttctattattaagcaagaaaaattaaaataaattaattaggtattcaagaaaagaagctgagggtaaaaagcactaaaatgaacacaaagttaattagagttgaactaatcaagataaaaacaatattggagataaaaaggaaaaagagaaaattattcaaacacactaattcagccgataatctgttgtcaactgcacaaaaggaaataaaacataaacaggtattagaaataaaatctggcatctaaacaaagggaggaaaataaatttaattgcaggagagtcttttttagctaacatttcctctttgctttttctagacatgtctaagagccaagctaagcaggaaagtttcatgacagttcacacaatggttttcctatataggcaaagatgtcaactttaaaacggcctcaacaatgcctgaaaaatcctgccaagtttctctgtctggtcctcaatgacaaggcttctacattttcccactgggccttcccaactccctgccaacttcctcctatcaatagcctgaccttcaacttctcagagaaaagtgcagcgacattaccttttaatgtgtaagccctttaagatcttatactctgttattcacagaggcatctcaagtacctcagacagtgcctggctcaaagttactactgaaaatacattcgaggagtgaagggatatcagatctgcacccatctgcattcattccctctccaccctcttccatttcaaggggagcagtgcctctcttcccaaccatggccaagacttcaacccctgcctgaactcctatcctttcccagcttctcaggagtattatattgacagttaaacttttttgctttattatttacactctaaatctaattcttcccaatagtttctcatttaaaacataacttaagtcttctcatttaaaacataactcccctcagaccaacatcttctctccaccttttatcgctctccttcttgtcaacttcacggatttcctgaagaattgtttacattggcctccatataccttggatctctgtgtatccaagtggtagcggcatttcattttgaagaataaaagcaaaatgtgtttcaatttttctttcttccctgtgacttcattgaaattgttcttgtcatgaatggtctatctgagcacatatccaaagattattttttcacaagtcatcaaatataagccttagtccccatttggagttgttaacagtcccctccttcttaaagtactatcttccccttgctttaggaaaccatacttttctggttttccacctacctcttcagaatctttttctgagttcattgcagattcattctcttttccccagccagtaaatataaatggtcagcaaggcatttactctcccagtttagtcttgctcaagtattacaactcagagttttaaggactacctacaagcaaatgacttagagttttagcaacagttcacgtcatctctctgacctccacacctggatatacaagtgccttcctccatccttgcatattcactacaaatcccctcaaattcaaaatctttgagaatgttgtcctagccaggtgaataacaaaaacaaacagcaacagcaaaaacagtttatctactatttacaacatatctgacaccaaatttgtaaggtttctttttcataccaaccacttgtttgaatgatggtattccctctcaaatttattttgaaacataattgtcaatgcaacactattgagaggtggtgtggcctttaggaggtgattaagtcatgaggggtctgccctgatgaatggaatgagcatccttataaaaggatgctgggttgaagggagggctctcttactcttctgcttttcaccacatgtgggcacagcagatacagcaacaaggcaccatcttggaagaagagattgggcccttagacaccaaaacagctgacaccttgatctttaacttcccagcctctagaattgtgagcaatacatttctattgtttataaattacccagtttgaggtattttgctatggcagccaaaacagactaagacatcaaccaattctccaactctggggacaccaactgagtttgaattttgacattaactacccatatttactgtagaccccccaggttaaggactcagtccctcaggtcttctgtcaattttatacaccaactgcaagtcccaggttgttgtcctgtacttctaatcaactggctataaattaagggttcccagacttcccacatcaggttagataacttgttgaatgtctcacaaaactcagggaaatatttacttatgtttgccagtttgttatgaaagatattctcaaggatccagaaaaacagccagaagaagtccatagagcaagatctgaaaaggtcttgaaagcaggagcttctgtccctatggaattggagtatgccaccctcctggcatatggtctcttgtaccaacttgatagctctccaaaatccatccttcagggttacagaggcttaattaggtatgatggattaagccgttggctattggtgattaagacagtctccaacccttgtcccctccccagaggtcagaaagtaaggttaaaagttctaactctctaatcatgtcttggtctttctggtgaccagccccgttcctaaagctatctaggaacctctgccatcagtcatctcattagcataaaaaaagacacttttatttctctctggagattccaagagtcttagaaactattctataagaagccagggactaagatagaatattataacaacagatgttcctcactccctaccatcttctaaaggattttagaagctctgtgccaggaacctggaagagattaaatatatatttcttcttgcatcataccaagtcagttctaaatcaaatgatatagaatgaaagtagaagagcttaatccttctgactgcatttaaattggcctacaaaatattgcatatgccttcaggtaagttgcacactagcagtattaagaacaaataaactgatattagtgatattgataaattaatattaacaaattttttagtcacaaagcagatctcactgacatcaattttgggaaagatttccatcaggagcacgagagaaggttagtggaaatctatacaaccctcactccccatgttttatccttcactaagttctgtagcttgttttacttccataggcttcttgctccttaaagttccagcgtgccttttattccactctcagctcataactcatttattttaatgccaaaattgaagcaccctaaaacactctttaagttcccaccactttaacaaatttagaagcaaaagggcccatgcatcctggtttcttttctgctaattaaagataaagtttctcctcctctcatctaagataaaccctctgcttgtgccttggatattcgcaatttctctctctcctgcatcctgtctttaccctcctcacaattgaatcattcccttcaacattcaaacatatcgtaatttctcacaacttaaaaatgttttctgggttccaatttccatttctggtagtatgtcagttttgttcccctttgtactaaagctttgcgaaaaaaaaagtctcctctttctctatactgcctttaatttctcttcttcttctcttgagccatcagaattagactttcaggccaagtgtgatggctcatacctataatctaagcactttgggaggccaaggtgggcagattacttgaggttaggagtttgaggccagcctggctaacacagtgaaagcccatctctacaaaaaaacacaaaaattagctaggcatggtggcgtatgcctattcctagctacttgggaggctgaggcaggagaatctcttgaacccaggaggcgaaggttgcagtgagccaagatcgcaccattgcacttcagcctgggtgacagagcaagactctgtctcaaaaaaaaaaaaaaaaaaattagtcattcagccccatcatgccaaccaaactgccatctctaatgtagagttcaggaagcagagcaacatccagaaaaagaagctgaaaagggcatgccaatgtgataggaggaaaaccagaataatgtgctgccctagaaatcaatgaacaaaagtaattcaaaaggaagaaaatgatggcctgattcaaatgctgctgaagatagaataagatgaggactggaaaatggccattggactggacaatctggaggtcactacgaccttgataaaagtgaattccacagagacactgaaatgaaaagcttaataaatgggctcaaaagagaatgggaagtgaggactgtaagagtccccaagatcacaatactcagggagaacgcacaatgctcagcatatagttgtatttacagttatgatttattgcaggaaaaggacacaaaacaaacacaattggcaaaaggaagacgtgtaaggagtgaagtctagggggaaatcaggcatgggcttccaagtgttctctctcagtagaatcacatatttaattcccccagcaatgagttgtgagaagttttaccaactagagaatctcattagagtctcacaacccaaaggttttatcggacactggttatgtggacagtctttgactgatgcataccaaaattccaaactcccagagtgacagtaggtgtctgacatgaaccatattgtttatgtaagcagtttgtatacaatgaaccactcttatggttaatggtggtggagactctcctgaaatccaaattccattataagcaggccatttaaagtcaggcttctcatataaactcttttctgcacaaggagagagagtaagcaggcagaaactactcttctgatgaattttgatacaaaagagataaatcagacggaagttggaaagaatatagaatgttaaaaggattttattttttatttcatcttatttttaatatgagtgagtttaccggatgtttgcatgatgacaggaatgatacagtagaagaggaaatttggtgaggcaggacagagtgggatatttgagtggaaaaggagaatgggattcagctcagaattaaaacataagcctggctgggtggggtggttcacgtctgtaatcccagcactttgggaggccgagggaggcggatcacgaggtcaggagatcgagaccatcctggctaacacggtgaatccccgtctctactaaaaatacaaaaaattagccaggcgtggtggtgggagcctgtagtcccagctactctggaggctgaggcaggagaatgccatgaacccgggagggggcgcttgcagtgagccgagatcaagccattgcactccagcctgggcgtcagagtgagactccatctcaaaaaaaaaaaaaaagaaaaagaaaaaaagaaacataagccttacgagggaacagggtaagttcacccatcatgtaagtaattatgattgtcaatagacataataaatatgtgtctactttagttataaattgtattaacaagagagttttgtatggtcacaactaatatgattaagtagacaaaatcaatagctatcctatttcaaaaatctaatgggaaagaaaagatcatcattcacggtatcagtaggaaaaatacacttatttggtatatggagaacttatatgaaaaatgctgtaaaatatcactaatggcataaaatagagaagaataagtggagaaacatatcaatcaatgttcttgaaaagaaagactaaatattgtaatagagtattttctcctcaaattaatttaatcaaatgtactcattcaaatcaaaactaatttcacagtgaggaaggttaaaataatgatttaaaactttttattaactaaattatcctcaagttatctgaatcaaattaagtttactgattcacatcaaaattaactggattttatagaagtaaagtaagtactaaaatttttcctcaatgttatttattttgtattatacaaataatatatattaattgtaggaaattttaaaatacaaataagaatgttttaaaaaacgcaaaatacaactatctggaaatgtaagacccaggaacagccacttcctctttatattttattgcatgtttttccaggcttttcttaggcttgcagtccttgacatgcctggttccaatatgcaaaactttctgttgccatagttcagttataagtcagtcccccattaagaagtttgaaatttcagttactgcattatgttaactgtgagtaattgcataaactacaaactttacttcttgctcttctgtccaccaatccctttgcacataacatatgcacctcaaaaatcagtgaccaaagacaacacctctttcaaagtctgtcggtaattagtcactgcacatttgttattcagctcagacacagacagcaaagcttatagctgtgttgcctctgtgtctcccagtgataaacccatgtaacattttataaaaatgaataattgaaagagagaattgaccaataaagtgaaagatcagcaaaaaaacaaaaagtcgtcatgtcggaagtgcaattcaaatagaatgtaaatggaattatagaagaaatagctaactctgggaacactggtactgttgccactggataggagcttagtggaggcaagcgtatagacatgaatgaggagtgtagttgtgacaggaaggacgaagatgtcccagagacggtgatgccagtaaaaatacttgaattaaagaaactcacagagatatttcatgacattgaaagggcaaaggatttcatgttggaagcccatccaaacttaaagggaatatgaccattggccaaggcatagaaaagatgcttgctccatatcataagttatatgacctgaaggcaggcactatttaaactacccttcataattttttttttttttttttttgagactgtgtcttgctctgtcacccaggctggagtgcaatggtgcaatctcggctcactgcaaccttcacctcctgggttcaagagattcttgtgcctcagcctccgagtagctgggattacaggcatgcaccaacatgcctggctaatttttgtatttttagtagagacagggttttgccatgttaaccaggctggtctcgaactcctgccctcaagtgaccttcccttctctgcctcccaaagtgctgggattatgggcatgagccaccacacctggtctatgatttttattaataaataaaacactttaattcctaatgcttctaatgtgttatattagaggatattaaacagacacggtcatgccctgtgtaatgacattttggtcaacaatgtaccgcaatgatggtggtgccacaagattatagtggaactgaaaaattcttgtcacccagtgacatcatagccattgtaccattaccatgtactgcagcacactacattttctatgtttagatacacagatatgtgccattgggttacaactgcttacagtactcagtacagtagcatgctgtacaggcttgtagcacaggagcaatagtctatatcatacagcttaggtgtatagcaggctataccatctaggtttgtgtaagtacacaccattattttcaaacaatgatgaaattgcctaaggaggcatttctcagaatgtattctcattgttaagccgcacatgactgtattaggtttactagtatttcatttctgtttataacttagatagtaagaaacaatttgtgtagtcatttttacagtgttacactaccataccaaacaagggctgccagtatataggatattctttccttctttctctttcccgctctctttctctctttctttctttctctctttctccttctctctgcttcatctcttgaccatttcataatagtataagtactttaacaaaaatggggccataagaaaaccattgttttaaattctactttatttgtttcacatataatacattactttcacattaacaaatataaataaacatcattttacattcagtaaatgcagactattccactgattggactgtgccaaaacccattcaactattctcccattaataaacatttaaattattccttttgtttactagcatgggcagaacagcaaagagctttctagaagcttaattgctgaatcaaacagtatatgtatgtatttttaaatttgatacatactgttgaacatattactaaactgaatttccaaaagttaccccaatttacacttccaggagtgaagaagaacccaacactcagaatccatatcaacagtagttatttttagtctttttaatcattgataatctgataagtaattttttgcattttttaattgaattgtttaactgaattaaatttgtgtggtgtcatgatatatatgttggtttttatccacagttcctggctcctaacttctacagtactttctatactcttgaggcactttaggcctcaggaaacagaatctctcattctggccttctcctgactttctttcacctgcccaaggcaggactctaatctgattgtgagtcaaaagaccctcatttcagagagtcctgcccatagtctagagaagggaatgctgcatggagagacctagaggaatctgaacagacaggtctttctgggtttagatcatactgtttttgtccaatcacattttgacacagttgctcatgcttccatcatggacaactgatgaagcctccataaaaggcccaaaggacaggatttgaggagcttctggatagctgaagatgtggagcttcctggagggtgtgtaccaatgcatctctttatctgtatcctttgcagtatccttaataataaactggtaaatgtaagttctgtgggccattccagcaaattaattgaatccaaagaagggatagtgggaaatccaacttgaagctggtcggtcagaagttttggaggcccagacttgagactggggggaaagaggggatggtcttgtgggactgaacccttaacctgtaggatctgatgctatctctgggtagatagtgtcagaactgaattgaaggacattcatgtggtatccactgcttggtgtgtgggaaaaaaaaaaaccccatacctttggtcacagaggtcttctgtgttgatgattattgtgatgtgaaagcagaggacaaatttagtttaggagagtttttccacaacacaatgtgtattggagcaaaattaagagaccgtagcaaatttctgttttccattgagaagcataaaattttaggtcatatggtttaaagttattcatattcaaatagactgttctgcagttcttcaaagacagcttttatagaatctgatgttatctcagcctttacagactagaaaataggggctaccagaaacagaatacaagttttagattccatgaattgttctttttactgacctgtttgccatagaggtctaggcattcatagtaatccacttggatgttgttgtacgctaaaaatgcttccaacattggaatccctagaaaacaaagcagggattgacacatactgattttgacattgactttctatcaagagtaaaaacgtaacactaaaagtgggcagaggtaaggaaaaaacccaagctaaactaaaagtgagcaataaatcaaatttacttaaatatcagagttaattatcaactttattacaacaaaaacttcaaagtttagcaataattttatatttattctgtgataaaatgatgcccttgctatttatgaggcttgggtagcatagcagatttttagtagttgagaaaattttaacactgggagtgttcaaatttccaagttttcttgaatcatcaaaagttctgataagatgagacctctcattcctacatgacaaatataggcaggagctgaaaagtaactgcttcctttactaaagggcaaatttaataatgtctaacttaccttctttattcaattatattgcctgcctaccctttgcttaagaaaataaatcaatctcgagcttccttacaaatttatattactaggagaaggaaaagaaaactcattatggagcctgattagcatatcaattatacttcaaagggacagcaaataagctttatcattctctgtagacattttatttcaggaaattattttttttcttcaacattgttctgctaagttctttccaactacctgaccaaagagatgacctaatgctgacataccctgagttaatgtgctgtttaggggttacacaggtttccacagacgtttccatagtcctaatgaaagcatttatccaacttgatgtcactggactctgctttgcagctgagaaacttagtccttttatgtatcagccccacaaataccagctcccttttccctaagaagagggtatatgtaatctgcctaaaggcgctctcaatattttgtaggtaaatgtcaatgtcctctgagaaggttatgctcttctactccagttgtaaattatttgcttcagaattgacttggctctgagaaaattcttaaaatgtatgttttagataagtaagtaaacttatagcccttattcctttctacccccaagtaaccttcaaattctcaaaagaaggaaataaagaaagacagggtacaaaaacatttaaccagccagcaggaggatggtcctcctctaacctttacccttgatcttgctgaggtaggacccttcgtgcccaggcataacacacactgttggaactgtgctgaatttctcaagattgcatttaccccccagcttctgcacactccctcctcctcctcctcctctttctcctcctcctgcaactgctgctgttccttctcttcttctccttctcattttcctcctccttctccttcctcttcttgtttttcttctcatccttctccttctcctccttcttcaacttctccttcttctccttgaaatgaggatcacgtaagtttattcctgtacctactcacaaaaaaatcaccatgaattccaaaaaaatacaaaattggtgtgttgttttggtcacttagttatcacaagttacagttactatcagtgttgtgatttgccaaaaggatgaacatttcttgttaaagctctgcaaataacaaagtacaatcttcttacactaccattccatttctagaaaaatcagtctatgctaaaaccatgcaaaatgtgtaatttgtgtggatatgtaaaatggggttaggttctaggttaacgtaagtggtttttttgcctcaatgaatgtctggtggaatatttgattgccatgctactggggactttttcactgtgtgaggatgaaaacatctacatatttgtctctagcctattaaatgacactgttacctcccattcttttgacaaccactaaagcctctgaaattttttgagacatgccctaggactgagcagtatttctctgttgagaatgattgccccagactttctcattaacaatagctggaaaacccccttcatcccaatttcaagggttctactctctcagtggatattacctctctctaggccatttcctactaccttggtactggcaattctttaattccaataggacctacaattcagtaaacacactgcctcttcactgtccctcaaactcctcatgtccctcctcacccaatttaaaatccatttgtttcttacactttgcacctgggaactccttccaaaggctgcccctgagctctgcaaccactttccccattgatagcaagctagaagtgcctgggagtatggcgtgttcgccataggcagcccatagccaaagactgattggtcccagagtgtaaaagcctcgttcctttgctccaaggcttgacaaggcctaaggtgtaatttattctccagaactcccccactgaatcaaggcaaagcagggagttcacctgtaatcacagcattgtgtagcttattctccttccttgctctgcttccttcactcctttgctggtctctcctggggaacatctctttgttaataatttgaacatgactattcatcccaaagcctgcttctggagaatccaaccaaagatactgaacagaataacacaaaagctcacttctgaaggtagttggcaggacttcaaggaatggtcttgcactgctttgcaaagctgagacaatgagcacctggaatcttaactcatctctccctgagtctatctgcccggagttagttatgttaccctaatctttcttaggtaaggaacccttggaagataagcacatccctcaaagcaaccatcactgagcaaagacactgtgctggcccagccgtttctgtaagaagattctagaactctaattttgagtcttatttattttacaaatattagagagaataaaagatagttagctggtttctcattaaggaaatagaattcattatggcaatgaacagaggcaagaacaatctagggttagaatgttgtttctcagctccccaaaatgaatgcttgttaattaagtccaatcactcttttctcaatgatatcgtagcacattgtgtgttccttaataaagtctcttgttttgattctgtgacatacagctaatttttactaattgtcagaggtctttatcttcatcatctttatagatgctccacaacgactaacttcttggtttgcccaaagtaagctctcagtaaatgtcagtctgttgactgactcacatagtgattggctgaatatccttttcatgctcctgttgtgggagggtataactctcttattcatcaagtcaatcacattctcccattagcactagtaagtgtatgtcatatccacccttatctctcacttcatccctcctgtcatagcccaggatcagggatagggtatatctcacccaaactcttgaaattccagccctgttgtcctccctgtcactgatcattttcagctccagtccaacttccttattgtggtctgattctaaaatcagagcatgccattcatgtaaaccctttagtgctccctacgcacctctctaacttcatttcccatcacacctatgatcctcataaattccacctttactgaacaacgtccaaacatgccacctctcccagaggcatttccacaggccattgcctcgaattggaatgtgcacccccttcctgtgagcctgggaacaccccctccccccagttcctttcagctccaaagtgccttctttgaaatcttcttacttctctaggaaggcccataaaaactcactttcattggcacatatctccaatgtagttctccagatattgtaaggaaatttctgtttggaagtgtttttcacccatagactgtgaattcctccatggaggaggttgtccccattctaatttgcattcctggaacttagtaatgacaggttaagggagttttgtacagagaaggtactcaattcattctggtggaaggcagggaagaataagggttgactagccatttcttgagaacttcatttattcattcattcattcaatcttcattcattcatttgttcattttgattattcttttattgggtgattcctaaaaatgggtagagtattataatggaagctcctgagaggcctaatatcataaagcatgaggccacttgtcagagccagaaacgctgaaagccaagatcactcatctcaggattttgcttagagccaaccatgtgaatataataaaaagaataatataaataataataataataatagcaagatctcacatgtatatatcacttaacagttttgaagcacttaagtgttttcaatctatttattacattttaaaccattaggaaaatttgggagaggcttctgggttataatcacccccgttgtattgacagcagaactgattacatgacttgtctcagtttacttgtgtgatggagtgtgaaaatagtccagtttttcacccattttttgtgcctatggttctggctagataactttgcaatactcctactcggactctggctccagccacatgactttcttcggtccatggaatgtcagtgagtcttgaagagaccctgtacaactaggcttgctcacttttgccctcaccgtaaccatggaaaggacctgaccaggctatcctgctgttaacagggaagaaagaaaactacctacagcagagaccagccacatcagtcatcccaatcaaggctaagagtccagatatatgagtgaaccagccaagactagaagagctgcccagatgacgctggactaaatcaccagccctcagagtcattagttaactgtatcttattgttttaagtcacttaattttgaggtggttctttataaaatattattgtgacaatccatccatttaataaaagcaaaggtaggactagagaagataatgactaaaatcttatttttatagtagtatctctttatagatactggctgccctgttgaccattagtggcctaggcattgaagatgcaacatatccaatttaaagagtttctatttccctccattccctggagcattatccatcttgagtagctctgtgacttatcagtgggaaagtacagagatacttatttacatcatggactcctcatgattttctaacttccaaattatctttcttattggaaatataattttttaatggcaattatccctagctatcctacattgagaaatatgtacctagtccagttgtgaatggtgaactatggagacgatggcattcactcctgagaggtaagacttaagttttatatgtaagtctcaggggcagaaatgtgagatatgaagagatggataaagagtctgtagaggaggtttattccaagttcccccttacaatcagatatgaagagcccagagagagagaagaagatcgcaaggcatgagctgaaatgagggatttggatggggtttggccagctggatcatggcagagtttgggaaggaggcagaggtaatgctttggagcccaagtaacaacgtttttcatggaacatagaatgtggctttcatgaaataagaacagaatggaacacggcatatgcccgtcagtagccttggacttcaacagcagttgaatgactaggcaaaatgcctcttgggggcacaatactcacttatagggctaggcatccatgattctgatgcaagcacttgtcacatgccttatgggtaccaaacactgatgaaatgaccggaagaagatttctacagattcaatggataacccagaataattgcatgacctttagcgccctgcatttatgtaggtgggggcaaggggcagcaagttttggtgttaaaataaaggtttaacctacaggctggtgatgtcaaaatatttgggtttcaattattaaaattaaattgaaacaaaatatcaccatgatgtgctactgtatctaagagaatggctgtgatgaaaaaggacagataataccaagtgttgacaaggataaaatgcaacagaaactctcacagaatgttgataggaatgtaaatttgtacaaccactgttggccagtgcccactaatgcagaatctatgcatattctttgacccagcacttctgctcctagatataaactcaatagaaatatgtacctatgttcaccaaaagatgtagagaaaaaaagttcatggcactgctacttgcaataggcaaaaactgaagacaacacaaatggccatcaaatgatcaaatggataaataaattctgaaatggtcacacatgaaatagtatagaacaatgagaatcaacaacttgcagccacattcaataatctgaatgaagcccacaaacttcatattgaccaagaagagaacataagaggacacgtgatataattccatttacataaaattcaaaaacaggcaaaaggaaacagtgctgtcagaagtgaagataattggttatcttgagagaaataggcaatggtatctaaaagcggaatgaggggttttggagaggatggctatgctctggttcttgatctggatgctggttacgtggctgtttttaggttatgaaaattcatagagttgcacacttttgtacactatctgcaggtacattatattggaattaaacattaagtgaaagtaatatgatgtgataaaaatgtggttgttttatgaagagttgacactctgtgtcttcattgctgaactagtaaattatgatctctgagttttagctttctcgttttaaaaatggggataatgctatctgttctgtctatttatatggttaatttaaaaatcaagtgagttaatgggcattataaaaaaagaagctctgtaaacggtgtaaatgtatacacatggaagttatccttattggaacaaaagcaaaagaggattttcattttaatttttaagtgattttgcactgttaaggaatacctccctttggcaaatgatagtaattgtaagtgttttggatcaagttttaagaagcaggtttgtcaattatataatagtctttaatgtacccaaattgttgcttttgtttcagaaaacagaaaattacatgatagcttgtaaacggcacattcaatttcacacgctgagaatgcttgaaaagtgaaaggtccacatataatgcaggaactcaaatttaatggcatcaaatgatacataatttgattcgttcgaccacatttccagaaattaatcactgagtgtcagcgtctttatgtccttcatgactcggtacatcaaaagaaatctgcccttttctgccattgcactactaatcagtaatagttagttctttccatttagcatttcaatcctatgttcagcatctggaaacatttttaaaggttagactgctactcccctattcaatttagtaaagtttcaaaaaccataatgagctttctttttgtacctcccaacatgcttagaatcacctttagaaatcaatggaaactttgcatgttagagtaaaaattgaaagtaaagattaggagagaaaactggaatgcatgacctgcagtttcttcctcttccactgatgtttctttttttttttttttttaagatggagtctcgctctgttgcccaagctggagtgccgtggagcgatctcggctcactgcaagctctgcctcccgggttcacgccattctcctggctcagcctcccgagtagctggggctacaggcgcccgccaccgcgcccggctaattttttttgtatttttagtagagacggggtttcaccgtggtctcgatctcctgacctcgtgatccacccgcctcggcctcccatacaggcgtgagccaccgcgcccggcctgatgtttctttagatcagggtttcccaacagcatcacaatggaactttgaggatgactatgattatgtgcattgtcttgtgccttgtagaatgtttagcagcattcctggcctccaagtacctgatgccagtagcacttctcccacagctgtgacaagcaaaaccaaatatttccagctattgccaaatatcctcggtggcggagggtggggcaagtgttggatagtctgtaaaatctcctccaattgagaatcactgttgtcgatgagtatctgctagcacctttgtcttcagatctgcttccgcacatctacaccttcatgcaatttcttccagactttctggaaatcatctgcatctaaggtgccttgatcagagagcacacacgtagcctgatggtttggcaaacccgtatttttgccttgttcactgggtgcagtgggtcactgtctactatgtccaccttcagagcatacctctgttgaaggtattaaaatgtgagagggtcagagagggcagtaaagacaatataggaaagaaggcaatccttgaggagaataaggtaatattcaggtgtgcctgagaaagaccttcatgatgctatgctgtgtgtctctgcgtatctggtgcatactggtgtaagagtcccttacacattcaggtgcaagagggatgacttccaattaccagcaaataagattctttgccttttctttttcttttctttttttccggccacagaaccatgtgcagctcatgagcagggactgaatgtaggtgctaggaaactagttttctgagaacaacccacagtctttgatggatggaaactggcagataatgctttcagctctcttgtcccttgatgaatgggagttagtaaataatgattccagctccctccacctttcatcaggatcatcaggatatccctgccagttcccccaagcaggattgagctccagctggccacagtggtaacatggtggcctcctcttgtttgtttcacttccctacttcgctacagagtttcctctgatcattgcagaataaattgctttcccttgaatcctgtttaggcggttggttctgaggaaaactaatgcaagaggatgtggtgggatatggatttgtgctgttacattgggctcctgtatgccccaagaccgtgaagatcatcttgagagaatccaaatccattgggcttctcctggtccaagtattatgtgctcagaaagaatactttctccagttacacacaagagaatttagtcttttcttccttgctaggatttgcaaaacaatacatattttcaaagagtaaacaacataacataactagatgatgttttcttagtctattttgtcatttactcagataggcacaaaatgttgcatggtaattcaaagctcttttaatcttataaggttatattctaggaacaaataatttacaatggctgtataatggggaaaagataattctataggattctgaaacaccaaagacacaaaataagtcatcctagaggaggaaatgcacttgttttactttttaaacatagtttactcatatttccagttgataaaatataatgccttttactctaatgtccaagtttgagaatctctccacatacaactctttaggatgttcacatcaaaattcaaccagaaatgattttacaggatgaattgagctgattgtgaaaaagtgcagtgaaaaatgtatatgcgaactacaaatattgaatggacaatgagtggtaggaagggaacatgtatcaatattgtatgcctatgaggacttacttatttaatctttttgaaattaggttgtcttaaaacatttttggaactcaagacaaagcataaagccttttaaacatattgcatctgtttactgactgcttacttgagcaaagattacattcatttttattatttattcatataaccaagtttaaacaggggttttaaaagtataaaaaagactgaaccataaaatatagttccaaacaataggatactaataaaacttaaaggcaagacatttagtttgggaaaaaaaaagatattcaacactgcaataactaagaatgttttggaatgagagcaactgtaatggacagaataaaacatggtggggctaattgcataaagcactatgcgtagtagattgaatatgctaataccggtatccattcccttcagtagtgtcctcccaccttgactctgggcttgtccttgggaattgctttggccaatgagacagtggaaacttgatgcaatcagacttgaacgtgtacttcctgctccacatggtctctcatgctccagcaggctagcctggctttgttctcagagcagtggcagccttccaagagagaccacatggagcagaatgagttgtttcacctgaggctgtcctagaccaactagcctccaggtacccacccactaaatgtcaaagtttgagagaacctaggagagattaatggagactggccgagaaacaaaactttccagcagatccacaggcataatggaagtaataaagatgatttcaaagccactaagtcttgaagtactcagcaatattaagtatacctactaggtacagataatgaataatccctggagtagaaaataagatgggaaatatttgttaagcatgtgggttagccttcatacttgtcattcagggtactggacacgagagttaacacatcaaataaatataagcatgatgaaaaggtttcctgacccactgtcagaggcactttctctgttaggagatttgctaaacaattataaagttaaaaaatctttgggaccaacttgggccttcagaattgatacaaaaattattttaaaataaagatatttgagattcaacagatacagaaaggcagcttcccagggcttcccttatctcagtaaaaacaaaaattctgggaatgaggctgctataaatcccctctctgagggagttttatggctatgaagaaaaaaatggagaaggccatttggacttgcataaacaaacagtatcacgaacttttatctcccattggttttcctagaaacccattggtttttcccacagaagccttttctccacacaccataaaattatgtatataaaccctcatctttaactatttatagagccacaactttcgtgcattcccacatgcatatggataaactttgtttattttcctgcgaatatgtcagtttcagtttagttcacatgtccgcaaacactgaacttaagagggtagagacaaagtttttcttcctcagtagaacacatacagaagtgccagtacttaacagttcaagtgctgagactaaattctcacctggaggctgggcatgatgtggctcagacctctaatcctagcactttgggaggctagtgctgatcccttgagctcaggagtttgagataagcttgggcaaccccggcgagagccatgatgaaaccctgtctctacaaaaaaattaaaaaattagctgggagtggtggtctgcacctgtggtcccagttacctgggaggctgcgggccaggtggaggtctcagtaagctgagatcgcgccactgcactccagcctgggtgacagtgagaccctgtctcaaaaaataaaaaaaaaaaaaaaaagaggaaaaaatccttacttggaatcattcatgttacatttgaacccatggccatattaatcaaagcactgacattttatcagcgattattacttttattaaaatataccagtgatgtacatataccatgtatgctttttatgctacagcaccagtatgcctcagcatgatttttagatgatgttggttttaaataaggaaaatgtagaataattgccacagatttcatacttgccacagatttcataatatcaaagttctgatcatgcttttctaaatatgtaaataagtgagactagcaattcttaaactttgctacatattagaatcacctaaagacctttaaaaagactctcaatgccctggcagcaccccagaacaaatatgctggaattatgggactgtgatacagatatcaaaaatgttttgtttgaacctgggaggcggaggttgcagtaagccaaggtcgcgccattgcaccccagcctggggcataagagcgaaactccgtctcaaaaaaaatattcaagtttctcaggtaattccaatgtgcagccaagtttgagaatcaacaacttagtcctagatctgtgctttccaatacaatagccatgagtcacacgtggctagtaagtatttgatatatggctggtctgaatcaagatgagctgtaagtagaaaatacacaccagattttgaagacgtagtgtaaaaaaatgtaaaatatcttgttaataattttttacacttgctacatgttgaaataataatatgttgatatttgggttaaatacattattaatttcttctgttttgttttacttttttgtttcatttttgttttcttttattgtatgcaaatattgtgtatagttctatgatcatatatagataattttgtatcttattattattttttattattttgctctaagttctgggatatatgtgcagaacgtgcaggtttgtaacataggtatacatgtgccatggtggtttgatgcacccatcaacccgttatctatctacattaggtatttctcctaatgctatccctcccctagccccccgccccgacaggctccagtgtgtggtgttcccctccctgtgtccacgtgttcttattgttcaactcccacttatgagtgagaacatgcagtgtttggttttctgttcctgtgttagtttgctgagaatgatggtttccagcttcatctatgtccctcaaaggacatgaacccatctttttttatggcagcatagtattccacatggtgtatatgtgccacattttctttatccagtctatcattgatgggcatttgggttgatttcaagtctttgccattgtgaatagtgctgcaataaacatacgtgtgcatgtgtctttatagtagaatgatttataatcctttgggtatatacccagtaatgggattgtgggggcaaatggtatttctggttctagatccttgaggaatttccacactgtcttccataatggttgagctaatttatacttccaccaacagtgtaaaagcatttctatttcttcacatcctctccagcatctgttgtttcctgactctttaatgatcgccattctaactggtgtgagatggtatctcagtgtggttttgatttccatttctttaatgaccagtgatgatgagctttttttcatatgtttgttggctgcataaatgtctcctttggagaagtgtctgttcatatcctttgcccactttttgatggggttatttgtttttttcttgtaaatttgtttatgttctttgtagattctggatattagccctttgtcagatggatagattgcaaaaattttctcccattctgtaggttgcctattcactctgatgatagtttcttttgctgtgcagaagttctttagtttaattagatcccatttgtcaattttggctttcgttgtcatcgcttttggtgtttttagtcatgaagtccttgcccatgcctatgtcctgaatggtattgccttggtttttttctagggtttttatgagtttaggtcttatgtttaggtctttaatccatcttgaaataatttttgtaaaaggtgtaaggaaggggtccagtttcagttttctgcatatggttagccaattttcccaacaacatttattaaatagggaatcctttccccattgcttgtttttgtcaggtttgtcaaagatcaggtagttgtagatgtgtggcattatttctgaggcctctgttctgttccagtggcctatatatctgtttgggtaccagtaccaggctgttttggttgctgtagccttgtagtatagtttgaagtcaggtagcgtgatgcctccagctttgttctttttgcttaagattgtcttggctatgcgggctcttttttggttccatataaaatttaaagtagtttttttctaattctgtgaagaagattagtggtaacttgatggggatagtattgaatctataaattactttgggcagtatggccattttcacgatcttgattcttcatccatgagcatggaatgtttttccatttgtttgtgtcctctcttactcccttgagcaatggcctgtagttctccttgaagagttccttcacatcccttgtgagttgtgttcctaggtattttattcctttgtagcaattgtaaatgggagtgcactcatgatttggctctctattattggtgtataggaatgcttatgatttttgcacattgattttgtatcctgagactttgctttttaaaatgctactagtggaaaatgtaaaattacttatgtaactcacatttgcggctcacatttttttttcccattaaacagcagtaatccagactgccccactaaactagaatatgatgtatggaaatacttattctaatattcatgtgattttacaaaaactgatttaatgaagtatgtgtttacattctagaaaactggatttaatgttttataggaggttcattttcaaagaaaaactgtacagccaggctgggtggcttatgcctataatcccagcgctttgggagggcaaggcaggtggatcacgaggtcaggggtttgagaccagcctgcccaacatggtgaaaccctgtctctactaaaaatacaaaaatttcgctgggtgtggtggcaggcccctgtaatcccagctacttgggaggcagaggcaggagaattgcttgagcccaggaggtgggagacagaggttgcagtgagcggagaccacaccactgcactccagcatgggcaacagagtgagactgtctcaaaaaaaaaaaaaaaaaaaaggaaaagaaaagaaaagaaaaactgtaagccaatagtgggtttcttgtcctgcttttgttgttgcttatgcaaaataatttatatgcatttaattgttatgattacactcaatttagtattttaaatgttgcacttacgtaaagttaacatacaattcaagttacagatgtcattaaaatttgcaaaagtcatcttattgaaaagttgtgtgccaaccaatcatattttgttgaataaaatcttaaaggagaaagggagatagaacctgtaaaaaaataatcaatattgttcctgctagccattttattaaatttggattttttcatgatcaaatattcttccacagatgctcctcaacttacaatggagtaacagcccaataaacccatcgtaagttgaaaacataataagtggaaaatgcatttaatatacctaatctatcaaacatagtagcttagcttagcctatcttaaacgtgttcgtaacacttccattagcttcgggttgggcaaagtcatctaacacaaatactattttataataaagtgtttaatatatcacataatttgtcaaatgtagcacactgtagagtatcagttgttacccttgtgatcaagtagctcactgggagctgtggctgacttctcagcatagtgagagaatatcgaaccaaatattgctagcctgggaacagatcaaaataaaaaattcaaattacagtttctactgaactcacaccatcataaagtcaaaaaattgtaaatctaatcattaaaagttggggaccatttgcagtaagaaacccctacattacctgtgatactgatgttgttgaatttttttgaatagcataagtaaaaagaaagaccatgaaagggagaatgctgcatatgaataatgtatagctaattctgtttttagtctaattttaaaccatttagagctagcacattgattatatttgcaaggcaccatgccaggtttatatatatatttttaaaactctggcccaggatacattttaacttatttcccatctcctagtatcatcctattattcatcagatatggagacaaaagtggctccatcttggatgctaatctgcagtgttaatttctgatcagccctagtcccatgaataccacctgattgctactttatttactgtccctagtgtaagaaactgtgctcctgcttttagagcaaagcaaccttgatgttatcataaaaattataggttgtgacacacatagcattctttcttgttttggagagttgcctttcattgtcttgctggaatacgtatacattttccctatagtagataagccttgggtatggggagtaacaggtgcagagatctacttgtcttgtggctatccaaggacattcttctgtctctaagtcccagaataaatccaccaacaccgacaaactaaatttgtctgcctcctctttggcttcttggctcctttagaatttgggggtcactttgcttatatgactctttcatggaacatcagatgataattatcatccacggcttgaggccatttctttcaatttctaaaacattgtatttgtagtacatacaaatactttaattccagttcctttaattcctagcttcctttaattccagatacatttatttcccagtcattgtggcaaaactttaatatattcacaaatctcataataaaataccatcctcattatttaaaatatactaaaatgtgtattttccccaaatcatttgtttttgccactcctggagtttgtttgtacttatgcatggtggaatatttcgttcttagccaaaaggaaaaaggagtcaccttgtgacaacgctggtcatgggacaaacatgatcgtcatctttgtccacctagttaatggtttccaactcaatcattcatcaccctttcataaatctaaaccccaccttttgttattttcatgttagtttttatgtatttggtcataaatcttaagtcagaaaaattacctgttattttttgtttttcactctaaagtcaaatctgccttaaatgaaacagccgagacaaataatgaggaagaaaaggagaaactgttacatttgaatggattgtgcttctcctgcttcaccctctcttactgtattccatgaaagtgaactcagaagcaaaagaggggaatgagaatgttgacttgatatttaccaactttgctcaaaacatatttataagatgctcatgtatttcattggctttcaccgtaagaaaatatgaaaagctgggaaccactatggagacatgattaggaaagtgagccctcagcattaactacctgagcaaggtacaattggcccaaccatttatgttccccttaaggcacttgtcacagtctgccttaaattacagttatagttatgcatttttctgttctatttgataaattctctgagggcaggatgctgcctagtacataacaaatagtaatatttgtagaataaatggaatattttaaccacttttgcatactccccaaaacaataagctcacccagaagcctattcaacaaacacattgattgagtgctctagcatgcacctactctgtgctattgggaattatttcaaaaataagctctttccaggtttctccttcctagtagcaagcagagtgaattcgactggaacttaaattggagtaaactgttcagatatgaattcatatctctgctttgcatgtttagtgtttgagagtacagctagagtctatctttagttaatggctcttaaggaatttatttgcaagtaattgcaatatttatcacatttttagtgtgtcagagctagggacaccaaaattttcttttacctcttaaatctgttttttacatatttattacccagtgaactgagaaaaggctttcaaagtgctaatatctatcctatctctttgtctggtttttcccttctgtgttcattcacaagtaatagtagttatcatttactcagactctgctataaactgggtgctttatgcacttgtgtttaattttttacagcctcacaaattaaagattataatgcttgtttttcagatgagaattaatttacataatcttcataacctttcaaggtgtattagtcagagttctccagagaaacagagccaacaggatggatatatatctatatatctattttaaatatatgtcaattaaaaaaatttcaccaaattgagtttcaaatatctgattggcttttattagcgattcatgaactgggcagcatccagtctacaaagtagaaagaaactctgatgagctaaacagagtgggtgagttttatgggcagaaaaaagaagagaaaagcagaaataaagaacaaatagagggttggtcatttcaaggttacttttcttctacagatgtaagcaaaatcttgttggcctagttggattccactgttatctctcttctgatttctcacaaggtcaaatcttgcaagtaaataacgcaagttttggtttggttatgtgacactagtatgagtgactccattttgaacctgctgtctgtttgtttgtttgtttgtttgctttttgcagtttaagagagagaaaagagagaaagagagagaaaggtattggcttatatggttgtggaggcttggcaactccaaaatcttcagagtaggtaggcgggctgcaggtctagggaaaaggctgcaagtcaatggctgtttgctgccagaattccttcttgcttaggggaagtcagcatttttctactaaggtcttcagctgattggatgaaaatcatacacattattaagagtaatcagctttcctcaaagtctactgatttcattgttaatctcatctaaaaaataccttcactgaaacatctaatgtttgtccaaatatctggataccatgacctagccaagttgacacataaaacttaccattatacaaggtaaatattatgatcccatgttacagatgaacacagtaaggctcacagatagtaagtaatttagacaatatagtgtattatgaggtatttggactttatcaaagggacttttgttgtccaaagcccaggtgtctttcactatgtatgctgtctctcaaattaatggtttttcatctgagcagaaatacgttctcccagggccaaactcttgctaaaagaagcatccacttgtcctaacagtattgtataggtctaatttatccaccgatatacattttgccaaggatgatgatctgatctaatgaagtaggcgcctgtcatgataaacatctctctacccaagaggcagtgacataagtaagggagtcattctgtccttcacagtctctggaaactttttgatcctttccattcctgataccaacccttgaacttaggaccctactacttcttacctagaacatatattacagcatttcatgtctctagttttcactttatattcctaaattctgcattttatcaagccaccaccgggctccccttctccccttcttccgtgcctctcaattatccacggaataaagctgaagtcgtgctaagcattaaagattatttccagatgagcttcaactacctttccggccgccgttttcatctttcactaagaacaatacactcagattaaacttgtccccgacaggatgcatggattcatatgctgtttgatttttttttttttttttgccacttatgccttcgtgttcacctttcctctttttcgcttctcaacgaagtttccatgatcaacccaaccagcagctactctccttccccagatcactgaagagtgtagtcgttaggtattacgagacctctatttatgcaccctccttatctgttagagagagggctggcatcagtgcctaaaaaggagccccaaagccaaatgcaatcggccctctattaccggaggatgccctgtatcccgcacatccactctgccagtgcaagtgttcaataaatgcttaatacattcattgatgaatgacccagagagaaaaactgcagttcgtgggacaaggacgaagtggcctctcagagatgcgggagtgctggctctcctccaccctccccgccttctccaagcccgggttcccgcccacccctcactcctgcttgaggacagggcagacattgcgcatgccccgtatccaaggccgcctccgggagcacctcccatgccgctccgctccctcccggtgaccgggcacgcgcgctcgctcccgcagagcgtgccctgcgtgcgggtgcccgccgagcccgccgggcgctggatctccgagtgccccggccggggcctgaggagcgggcacagggcaaggcggcggacggctgcgtcgcccgaggcgaggaggagcgctggcggtgagtgagggcgccgcgggcgagcgggtcggcgcctccgcgcgtgcgcagcgcgggaccgcccgggcaggggcgcgcgccctgcggccggccggaggggccgagcgaagcgaggagaggccgggctggtggccgcaggtcggcctcggacccacgggaccagaggatcccatatccgtcccccgggctcgagaggcgctggccgcgcgggctggctttccgagggggggggggtcccagtggggcgcgtcgggcccgcgcggaggtcctggtgccgggggcggaggggcagggccgcctcagccgaaagaccgcggggaggggcgcacgagcccgcctggccgtgcggacgcccgcggggtgcgcgaccccggaggtggcggaggtccaggcagggggcgcggtcgggaagcctcggcgcctagcaggtggcgggggccgcgcccctctcccggggaggcgcgcggtgggaagcggagcaaacttcccctaagtaactttcctgaggcgctgccggcggggactccggggaccgacgctccgggtttgcgcggcctcaggcgccgcgggaacccagcgagtggcggcgggcgatggcgggggcggcttcctcctgaggctggactagtcctccgagttctgagtggcatttgtggcccgtttgctctaaaaatagacgtacaagtttggtgttcgggaagaaggatgtttgctctcttgggaagaaaaggcttttacctcctggccttttcaaagaaagtattgttcgggcctgctggggatccctatttatcaagcaacccattgtcctgtgtgtgcctggtgaaagcgagctaattctattattagtcctcaaaagaccaagggagatcacggtgctttttcttttttaaatattccccgccacctcgccaaatcctgtaatacagtttccccaaacttggctgcacagaggagtcgctggggagttttaaaactcttaaagcccaatcgcacaccagaccaattaacacagtgtattttttaaagatccccaggtgatcgcgcagccgagtttggaaacactggtttaatataagaaagtcaaggctttagtttcacatagtagtagcattcagtttgtaattggtgagatgaaactcaaattcattttcctagacaggaactcacaaagagcggtttgtttcccaccagggagggagggaagcgtctctaacggttcaaactttgtgaactataatgtgactctagcactcaaaacaattgttctaagtgttgttttgaatttctgttgaggttactaagcccgctttcactgactccctgcccagccaagggctttccccttcttttaaccctacctcagtcccctactcaaccctctgccagatcccctgttttaactttaacctgagggaggatcttcctcccccacaggttactggctttaaagggttactgcgggttcccatagcaacgagtcctccaggggaagtgggcgggtcctcttacccttgggtttctgaacaggactcttccttttcggaagaatttttgaatcaccctttttcatttcttggcctcagcaggtaagggtgagcttatgcagttccaagatgttctttctgagatacttacagattattaacgccgttgtatgggatgataattactagcagccatgttctttcttgatttctcattctttcccaatccttgcactgataacttgtttaacaaacttccaaaatgaagtggaaacaatgttttcttttccttttttagcatgttttcttggaggtgcacatgcctaagaattgtatgcactatttctctaaagccctaagttatatcttatatttaaaaatttaaaaaaaatataactccacatctgtgcggaaaaacttttgataatttgtggcaaaaatgccatgcttagcttttaagttgttttgttcctagaaagtactctgccaacattctttacaaaatgttaaactgcttgtaatgttatactttaacaaaggaaaggcacaattagtctacacattctcctacttccctgcccaaacacatgcatccaaagatcaatttgaaaaaatgttcatttttttttttaatgctcaaaacaggtatgctatagacatctaattccattttgccttgcaaggaactgttaaaactcttctgaacaaaatagtacagaaataggtcatttaacatacttgtttttaattgtgttttttaaaaaatattttaaactttgtaagttatcagactttagtcaattccaaaatacctttaggattccagtgatttttgagtttgtgttgggagttgaaatggttttctcttactaaaatctattttatgtgctgtttaaatttctgttaactgagctatcaagcaaatcctgtaaggtgaatttttcccatttactgtgagaaaggaatactggtggaaacccctatcatgtgatggaccttgtagttccagcagtgatgctgggctgctaaaataataatctttcacttaatcttcccttctttcatcacacatttaaaaattacctttaagccttttcaatttagtatctctttcagcatagttgtccagtctcaaattccttgaaggtgtgcattaatgtacatttatcgacatgtcctttgtttattcaaattaagcaaatacagttgagaatttgttgttgctttgtttcttttaaaaaattaaataaaaaaatatttcctgttgggagacattttgggaatcactgaaaaaaattaagaaagtaaaaatcaccgtcatatcatctaaaaagaaacaactggtaattagatgatgtgcttccattttactctgtttgtctgcatagacatacttttgaacaaaattggcctttaattttatctgtagttttaaatattgcacttttatttaatatgaagtaaatattagagacgtttcctttttctgtaaaccctttgaaaataagatttttaatgatgaatacacccaagtttattgaactagttttctgttgttttacgtattatttttagttttagtggcttgagaatacagtattaaaccctttggttgccaatcctagcacggccacttcctaagtgaccttaattacctctttaatcgcatttccttggaataagggtcatggtgcctgcaccatagagttttggtgagatggaatgaactaagtagaggaaggccagcagggtcgaccaaatgacgtaggctcagtacgtaagagtggacacacaggtggagctgagaaaaatgcccttgtctgaaagtttaaatatttcggatttactcaggttagatttatagcagtggaaatcctggggcagaggtgaactcttttatgactcttgtggcttgttgccaaattgcttatgccataacattcccttacagagtgtatggtctacctgtagtgtgtcagcactccagtgttcatcatctttcctgatttttctataaaaatatgatcttttaatttattttttggtagctattgaaattgatcatctgttttttttcttttgttttcctttttgggagctctctcttctggtactttgcctactttaaagtggtgatttaaaaaaattaaatacccgttttatctaaagaagattgagtgtttatcatgtttttagttttcttttttttcttctccacaggccattatttctttcactttttggcgtttttcaaccaataaaatatttttatttctatataaacaagtctctaccttgtcctttatgattttttccttgtatttgttcatgcttggaaagcccagaaagaccctgcaaatggccccagtgaaaaactcaggagaagcagtaagcagtcaaaagtggatggggaggaagactaaggcgttgaggaagaccacttattttacaataaggcttttagactttaaagctgtatgcatatattaaatttaataatctttatctgaaaggtgagataaacaacattttggaaatatgttagatctttttacatttaattctataattgtacatggatatgaagcgctcctataccgccgctgcctcctcttccttttccctagttagcgagttctaccaccatttgttaaatagttcctcctttcttctttgctttgtggtctttattgttttttaagatcttgactaactttgaggtctgcttcagttttaggtcttgcttctctgtgtgttgatcctctagtcttaatcaatgccacatctttttaatcatagatttagaatatttagaaatacctggcagagcaagtcacactatccttttaacattacaattctatgcccttgtcctttcagataaagattattgtatttaatacatgcacagttttaaaagtctaggaggcttattgtaaaatagatggtctttcatctgcctcttcttccccccatcccttactctccctccccagtggcagctactttggattgtttactgtttctcctgcgtttttcactggggccatttgtagggtcttcttgggctggtcagagagtggtcttccagtaaagttttgcactgaggaaagagtgtaggttccagtgttcatggaggaatctggctggggtttcagcattctctgtgtagagtcatgttggagaaggttcaccatacagacttacctgtttacctactcttccaagaacaaatctctagtcttgctaggttctaggattgtctgccaatggtctacagtgaggaggtggggaaggcatcttggaattttagagcttctcatgcagcttttactgaccttattttaacctgtcacccttttaccctcagtctttgagcagactggagtgagtacttctcggcttttctcactgttggtatagcattccctctctcaagttggctgagacagttgccacttgtccatctgttttccactttcatgatttgtagtttccattacagttctttaagtccttgggtctctatgtcttctagaaagatctcttactgtcacttaagtggggtttagggaaagggtgtaattggatatgtgtgttaaatttaccgtcttaatctggaaggctcggaagatgaatccttagaactaaaaaaataccggatcatgttacattttgtttcgttggcaaggactgccatctgtaatcagtgtttcttttaagggtcatgaaagattattcatgaccttttatctctcagcagagttgttttcttcatctgaatcctaatgtttcctgttagagttcttcttaggtatttgtttttgttactttgtgatgggctcttcaaattggctgtcggtagtctaagatggtggttgattttggtgtatttattttatagctggcacttatgcgaaaagctttgcagtttatttttgtatgttcccaagttatatgagtggcagataatgacacttttatctacttttaaatagttatgacttttattttggttctgtggcggtttgcactagatttagcattctgtaacgttataacatctttctggaacattatcgaatagtaatggtgataatgtacacacttttattgttctttattttagtaaggaaaagaatagtagaatattggctttttggtttatcataattcttcatcaggacaaagaaaatctatcctttcatttccaagttgcctagaggtaattttatgtttttaagacatgggaattgaatattagcaagtgatcattagcatctgcagtttatctgctggtatttctgaagagtctactgatttgagtcccaaatattaaattggatcaaaattttccttatggatggttcttcagaaaaagaaattgaatgcatgggaagaatgtagtataacatattcaatgcatgagcatattgtcttggttggggtggtataggagatgtcactagggatttttcacaagcaaatattccaagttatagctgacactcaagtcacatctttacctgttggcagtatttgatgtaatttgttattcctccttttttaatattcttccttcatttgattcttgaggacaccacacactgttgccttcccttctataccgctggccttctggtttcttttcagttgtttttaaatttgtgttggttttctcttctcaccagcctatgaatttagaatgtgccaaggctcagttctcacccgcctgttgtcacaaatagtcacagggctttaataaaatactgtgtagctacttaagactcctaaatgtatatttccacctcagacatctccaactacttttttgacttcttaacgtgaatatgtgaaagacgcttcagcctaaatatggccagaacaaaatttctgatctttctctgcaaacctgctccatctgcagcctgccccattttattaggttggtgcaaaagtaattgtggttttttgcattaatggcaaattacttttgcaccaacctagtgggtgttagctccatttttttcatgttatttaagcaaaaaaaaaaaaaaaaaaaaaaaaagaacatggaatcctcctgactcttctctttctctccaactctgtttccaggttgtcagcaaatcctgctgttctgtcttcaaaatgtatccagaatcagtttaactacttttcccatccgtactaccagcatctttgtccaagtctcctgcatttcttgcctggagtattgccgtggcccatggcctcctaacagatcactggtctccttttccttccctggcttctctttgattttccatctgcttaacatcagagtgatcttttaaaaacataagtcaaattgtgcttaaaaccctccagtggcttccatgtcactcagaataaaggccagtgttcttatgattcataaaaccttacatgatctgggccgggcatggtggttcacgcctgtaatccagcactttggtaggctggggtgggcagatcacttgaggtcagcagttgaagaccagcccggccaacatggtgaaaccttatgtctactaaaaatacaaaaattagccagacgtgatggcatgcacctgtaattccaggtacttgggaggctgaggcaggagaatctcttgaacctggaaggcggaggttgcatgcagtgagccgagatcgtgccattgcattccagcctgggggacagagtgagattctgtctacaaataaataaataaataaaaattaaaaagccctacatgatctgattctcactaactgacctcttctcccgcttgtctcccactcggcactttccattccagccttccttacctccttgctaatccttgaacgtggcaggcacatttccattttaggtctttgcactggactttttcctctgcctataatatttatcctacccccccagccacctctttcaggtcttcactaaaatagcattttgtctgtgcgattactctagttacaattgcaatctgcatcctgtatgtctcttgcagtgctctgcattttatttttccgttgcatctgttaccttctaagttactatttatttgtctattttgtgaattgcctctctttcctacctctgctagactataaattccttgaggtcgagtatgtttattaatgtgtcctgagtgcctagcacatagaagatgctcagtaaatattttttgaatgaatgaatgtagtctgccttctccaatttttttttcagtgaatttcccataaagcaacacatgcatagtgttttagcatttgtggatctaacgttgacttatcccaccagcaagggagaagttcaagaacatttatagtttataatggagataataatacagagagtggttatgagaattaaatagggtgctctctgtaaagtactaatggataggaccaggtcacttaactgacaaaaaagcctggccaagtgccctgattcacatctgaatgatgtgaattgtattctagaatcttctctctttatatttcagtttttaatcaagagtaggtgtggcatcacctgggagcttttcaaaacatacctgggttccctggtaaatatcagtgatatactgttactatattttgttctttaaccagtctgcaaatatttgtcccttaatgtgggtgataactatttgctctcccccttttaatgccttcttgctgtttgggacatctttcatggccccttctagtcttttttcctatgaggttcttgctgaaataacttctaaggtgattttgaaatcctcagagccacttggatgcacgtaattgaaccttttactaaatccacaaaatcaaaggatctcagtcctttaccttctgttttccagacaagagaatgttgtagtcatccctacagcaatccttatagcagtcattttattttattgtttttaaaatacctgatttttattttttcatatgaattatattaaataattattatgccccctctagtcgtcacacaaatctgagaagtggatgagcactgtatttgatctcttggacacttccctttattttccatggctcctcatgtctcagacccttaaagtatttgcattcttttcttttctttttttttctaattgtattttatttttacttccaggatacatgtgcaggacatgaagatttgttacataggtaaatgtgtgccatggtggtttgctgcacttaccaagcagtcattttaaagttttgcttattgtgtttctaggctccttttgtgtccttcaaatccaagaatatctcaaaaacatcagactcactttcctcctctttcttaatagagcaagaaacatttgtagatttttactgttgcaatttactgtgcaagcaagtgctgtgatttgcaagaaaaaaaagatgattattttagagatggtttatgcaactgaagaatacacaataaataaaaaccatgatgtatgtgtgtttagaaatggataagcccaatagctgttacctatacacaaaaatgtgaaaattttcttcaactctactgtcaaaataattcaaaatatacctagctccttgtgtatatttgatctctccttaatttttctatgatgctatataagtaagagcattccccatatttaattaggtgtaaacattttagcggtgattaccatgcacattggaaataaaatgtcacaagttccattgctttgaatgcatctgttctacctgataaatttcccttgcctttgcaactctgattagatctactttttgttgtcgtgaagactcattcttttgaaaatagtgctgttacaaattcattttatattgaaccctaaatattcagtactattggccaaggctgaatggaaaaaattgacctatgtatctttctgatgataaatcacattgccctcagtttaggccattaatggacagcccagttggaaaacacatctcgtttaaagttctacacctgctttggagactcttgtaagtatttgttgcctttgtgagagtttttgtcttttaatgccacctaatttcttctactaatctgttttttttgaaagtggcggtcttgcctacccatcaccagcaaacatactctatagtgagggactaattttggccctctgctatgatgttgtactttaggtctctgtggatagagaaggacttctaatgtagactgccacctattttcatacctttgttcatggagaatgtagcaaaaagtcaaatataataaagtccacctactttttttttttttttttttgagacagagtgtggctctgtcgcccaggctggagtgcagcggcgacatctcgactcactgcaagctctgccttctgggttcacgcctttctcccgcctcagcctcccgagtagctgggactataggtgcccgccaccatgcccagctaattttgtttttgtatttttagtagagatggggtttcaccatgttagccaggatggtctcgatatcctgacctcgtgatctgcctgcctcagcctcccaaagtgctgggattacaggcttgagccaccgcacccggccaaagtccatctacaaatttaatgtgttgttggagaatgatctatattcctagaaaacctggaaattggtacaattcttaattgaggttatatcaggtgacttttcccaaaatcttattttcaatagaaaaaaatggtgagaagctacaaaagtccctccttctgctcaggatgcaggttcaggctacagggaactgttggtagcattctcttgcacagcacctccccgctctaccacttagacatcagtgttgggtggaggtgcattccagagtgctctgtctcttcctgtggtttttttgttcaccatcttttgtggccttgggagacaggatgaataagtgcttgaagctgaagatcatctgttggagagtgagctgttactgaaagtggtcaacagtggagggagcgtgcacatgtgcagtcacttttgatccctatgcagtcgcagtcagtctctcatggtggacttccttacccttccccaagatgatttcagcacctacttaataaatgctgtgtaatttatttatttaaattagtagattgtctagttaatttaataccattcaataagtatttctgtgggatcagctcacgcgtacttgaaatgttttattactttattagctactttctcttataagtgatccccccaaaatgtcagaatcagttctgaactcttagctagcaaatatctcctagcatatactcaaaatcatcaccaggcagtgatggatttgactaggtgggtgtgggttagggatgtcaatatataatggtgttcggtttggcttataggaaaatgagatgctcaagataaggacaacctatattttgattttacagtgtttctatagtattatatagttactgagtgtgaagtagttgtgaggatcagaatcctactaaaatgtacaacctcttaaaatttttttaagagtgaagatgggaaggtgtttggatgctagctctagtaaaagactagacccttgaacaacttgagcataaagaggcactgatgcctgcccccaccccaccaacctcccaccccgcacagttgaaaatccatgtgtaacttttgactcacaaaaacttaactaatagcttactgttgaccagaagctttattgagaacataaacagtcagtaaacgcatattttgtgtgtcgtatatattatatactacattcttacaataaactagggaaaataatatattatgaaaatcataaggaagtgaaaatacatttatagaaatgtactgtattcatcaatattgtaagtttacatcatctgtttacaagatgaatcatctgtctgaaatggtgggtgaccacagctacagacctcaatctacagtacatatcaagcaattcaacttttttcttgtagtgtcttttctatgcttctcggaagcacttctagcatcactaatggcactttgtatgggtctcatgatgttattcgtggtttactgtattgcactaaacatgatgagaaatgcacaagaaccaccagagatcacattttactgccataagcaatatattggggagagaaagtgctcatgctgagatgattagcatcatatggcactttaggcagatactggcaacacttgagttcaccacaggaataacaggagatggctatgaaattattacagtagaatagtatgtactacagttaattttatgcctttatgatttaatactgcatttttacatttgtttacatttctctggactgggaatggcactatatacagtcagtatgtgtttgtgtgcataaattttggtaactctcatagatgtgtgtatgttttatggtagtaaatgataaaatagactcacagctacatgttttacccattaatgaaatacaaaacttaaaaaaatttcaatatatctaggctgtgcagttcatctgttttttttaattgttacacaaatctccaactaattttccaatatagttattgaaaaaaatctagatataagtggaccagagcagttcaaacccatagcgttcaagggttacctgtatttttaaataaaatgttatttagattaagtatttcttttggacttttacaaagtcctaacctaaactttatttccaacaaactgttttcttctatttagtatataggaagatttcgatattttatggtatcaaatgccatactctgtagatacaatattaaaatggcactgtaggaagagtcatattctgcctgatatatctctctttaaatgaaagaaaaaagttaacaaattatcttaaacattggcagccatgcttgctttaggagaacaccaaagattgctacccccaattctcctaaggaaatgtgatgtaggagaaagcagattttcagagagagatgtttgttttcttgctggtttatgtgaagtttgtagggatacttgtctacctcaaagctcatttacaatttttttcttaatgtcttcaaagaggatgtcaattaatatgattttgcaccctaaattctgtgaattttctgaggttggggtattgacgagatgccaaacagtgccattgaacagatggaagattagctctttgactgttcttaattttttttttttgaggcggagtttcgctcttgttgcccaggctgtatgcagtggcatgatctcggctcactgcaacctccacctccctggttcaagtgattcttctgcttcagcgtccggagtagctgggattacaggtgcccgccaccatgcccagctaattttttgtatttttagtagagacagcgtttcgtcatattggccaggctggtttcaaactcctgacctcaggtgatctgcctgccttggcctcccaaaatgctgggattacaggtgtgagccaccgctcttaatttttgtggcagagattgtctcttgtatccttcattctgtctacaatgtgcaaaaatatattttggagtgaatggttgagatttgtgctctgagaattagttactgttttctaggagaatgaaagggaaaaagtaggtatgtgtaaaaagttggccctgatcttgtatatagttcattaagaattttttttgttaatagctgtatgagtccgttctaacactgctgtaaagcagctacctgagactgtttaatttataaagaaaagaggtttaattggctcacagttctgcaggctctacaggaagcatggctgggggtggtgctcaggaaacatagaatcatggcagaaagtaaaggggaagcaagtacatcttcacgcgctggcaggagagagcaagcaaaggggcaagtgttatgcactttcaaacaaccagatctcatgagaacttactcactatcaaggtggaaatccacccctatgatccagtcacctcccaccaggtccctccctcaacattggggattacaattcatcatgaaatgtggatggggacacaaatccaaaccatatcaaaagcctctagaggcttacaattacgcttacgataaaatccaaacttcttatgaagctgggcatcagcttttctcatacgttttggttttgggacctttttatactcttaattattttcaaaagcccagaaaacttgtttataggggtcatatctattaatatacttttgtcaaaatttaaaaaattaagtatttatttaaaaataattgttttcattgaagcatatgaagaaaatctggcctcaaacagatgtatagctggaaaagaatattttaatagcattttcagatgattgtggatatttgatacctcaccaaagcttcataagtagtagtttcttaaaggttaattgccatgtggaatctaaaaccatatcgatgaacgttttgtactcttgttatactttaaatccattggtcgaccattgtactttggatcttttaccaatgcatgattttgtattgtaattgcattcttattagaaaaggttggttcactgagttatgcaaatctttcaagtgttgacacatttcattatacagtatcaaaaatcatgttcatttaatatcactgctcttataagaacagtcttttgagtattgggaagctgtcaggctcatggtggtgtaatcaaggtttccaaattctaatttttgcttgaagccttgaattttattatcagcaataaatactgtcagttttccttgcagtgacaggctcacttcattcatttttgagaaaatgtctgccagataccttagtctgaataagcatactttgctgcttctgtcaagtaacaatggcatttcaagaaaaaagctgctggtttgacttgtaacacaaatagttgtacacgtgttttttctcaaggaaaccattctatttcaatttgaccagaaatgctttgtgcatacttcccaatttcatgacgtagaatattttaaaagtgtttactcaacagctgaagtttaataaaatcaataatttttactattgcatctcccagagattccccatgaaacaatacattgattatagcaaaggggaatgcacaatagctattttgcacttagccaggccgttttaccgctatgcgtaaataaatcccccatcattcaggtgtgggtgaggaggactgcggaaaagtaaggtgactttactgctcctttggcactgttcacttttgcttagtcactggagtgaccttcagatggcttagaaaccagcagcatcaatagtaataaaagttacagagccagactatggagccatttttatcttttttagttcctggtgaaactcttgccttttctgttaggagcaaatgatcccttccattgtggcctttgttctgcatcaccactagcagatgttgctgggaggttgcagagagatttggtcacttgttctacttactttcttaaccagtgcaagtcagaactgcttaaaaggcttcatacttttaagtcatatacacattgaacaacaggcacacatggaatgaatttacctcaccctgccttctaagaaatatacttttatggccagtgaattcgttattgaaaaatttgagcagatttatttatttatttattttggccaacacaaatctcaaaactatgactttacattttcaacactcttaatggtttttaaaatcattgctggtggtaaaggttccataaacacaccggcccagcaagatactttccagttttggccaaaaataagttattccactactgataccataatttccatttattattactccttttttttttttttttttttttttttttgagacggagtctcgttctgtagcccagggtggagtgcaatggtgttatcggtgctcactgcaacctctgcctcccaggctcaagtattctcctgcctcagcctctcaagtagctgggattacaggcacatgccaccacacctggctaatttttgtatttgtagtagagatggggtttcaccatgttggacagtctgttcttgaactcctgacctcaggtgatccacccagctaggcctcccaaagtgctaggattacaggcgtgagccaccatacccggcctgttacttcaatgttgtaagggaatatatagatggaagttgagaattctttattttttgtaaaaaagtcaaacacctgattacttgcctgattcttcttagtgaagtgagacagagactcatgcatgtaagcagtatacttttctacttgtgcttttgctctgcagtaatctgaaatgagacatcgcccatcttagaattgtggtttatttgcaggggaggcatgcattttcctactgccctatacacacaagcctattttattactttgtttgaagactgggtgtgtctaatgtagtggaaattcatcgattcagtgttaagtacaggtgaaacacatttcaggaccacattagacagtctttttaattatccttttttttggattattcatgtgactgctttcctcttttcacgtgaattgctgagaatttatcatcctttccagttcattaaatcattaaaattctttactagcactataaataaatatgccaggccatgagttgaggccggttgataaaggcagctttgtcctggtaatagttcttgttcctggttaacccacacttctctgtgaatatgtgtattacattaaattttagacttttaatgtagtgaagccttactctaagcatgtagggacttgctttaagttgagctttggtgtttacagttggattagctgtgagattaatgtggtattataatactgcatttgtgcttagacatgttcaggagagccccaggacacatttaataggtattcaggttcttttccactctacctagtctaagcttgcatctcagtcaactagaaacactgtagatcttagtttcagaccattttggtctaggaccagttgcaccccacaagtgtgatctggagttctaattggacttggaagtgttgggctttaacctcctcttgtgtaaccattgaaagccaggtgcatgggcatggcactgttgcagatatggagatgcagtcctcagagaaagcacactttaatcaggcaacataaggcaagatagaatgtgagaaagtactgcatttgggcatgatgagtctggaagcaccaggaaaccttccttgcttaggtatcctttggactgcgtcttgaaggatgggtgggtaggctttttatacgtagggttgtacagaagaaagggcagtgaggatggcaggaagcaatggacccatttgtagtgtgggaatagtctggtttgcagggtgggtgaatgaagaggatgagtcaaaagatctaattgggaattgagccaggtcatggagatccaaaatgcattgcaagccatgcttcctctcactgggaaaggtgagacagaatttcttcccttcttccggggcggatgcttgtttgcacttctctggtatgtgagagagaccttcctcaatttagatgatagccccttagggaagagcattatagagtaaagatttgaccacatgcctctttttgtctcatttttgatgctatattttaaattttacaagagtgttacttcagtcaaatactgacatcacccaggtctcctatacggaactcttagtagaaattatggcatctccgcagatgacaagtaaaatccttatgcagagagacctgactcagatgtaaattgtgatcaccattttcagagattgtccttccttggtctggttccagtcatcatcaccttggatcttgtatgagttcatatctctgttaactatggtggagtggttgcttctctgtggttttttttttttttttttaaataaggtactgacagttgagttgccactctttgaagatgtattttgactttaatgtttttaatctgtttattatggttaaagttcctatgtattataaatgctgtcctccctattgttatgtgatgcagagactggagaaactcaaatttaagaacatgttttcatgaatagtccccactttaagtgagacttattttagcattatttcatgagcaattagattattttactctaaatctctgggcagttcaagtactgacctacttatatagtagctcttaattaaaaaaataattatttttattttagagaatattagagaattgaattttttttgaaatactctattttcttagttctaatacatgtgataaagctaggtatggaacctcaatttttattctgattataatagcatgagaggttgaagcaacaaagaagtgctttatcagtgtcgaattattatttcctgcagcaaatggtggtagtttgtgaatgttacttggtgttattatatttaaggttataccaacatttaaagtatactgtgcctttctattgtgtacttcacaacagttgatggggattgtatacttttaagctaattaaaagtagcataaaacggccaggcgcggtggctcatgcctgtaattccagtactttgggaggcctaggcgggtggatcacatgaggtcaggagttcgggtggatcacatgaggtcgggagtttgagaccagcctgaccaacatggtgaaaccccgtctctactaaaaatacaaacttagcccggtgtggtggcgcattcctgtaatctcaggtatttgggaagttgaggcaggagaattgcctgaaccctggaggcggaggttgcagtgagctgagattgtgccattgtgctccagcctgggcaacaagggcgaaaccccctgtcaaaaaaaaaaaaaaaagtagcataaaatgtatcttttaatttggttctagaagagcttttactgtgagtttttgccagaaactggtttctgtaataatgctctgttacagccttctaattctacttgaattttttgttagggaatattattgttatttattttagaaatgtaggtgccttttttcatttttatttggtggtatctactcgagagaaggtatgttagaaattgagtgttaagctactttgtaacttcatgtatgtttaagttttcccacagcaagatttctcagatttcactcagcatagcagacctcttaatgttagatcttgtattgtttgcccaaaataactatatttcattctggtcgcatacattgtaaaacaaaggatagcatttcattaaatagtaattaattgagaccttctggatatgtgtatagtgtttgtcaaaatgtgaaattgtaactggtcttttctatgtggttttgcaaaacaaaacaaaacaaaacaaaacaacaaaataaaaagctttttctggccttgcctttcccaacctgtcctgttcattttacagtgagcacaatttaaaatctaagataattgatataattcaggtgtttggtgttgatggcggggaggcagtaaattgaaggacaggagagcagtgtttatttctaagcactgagtgactaaaggtatagaacttagttgtggatgttggggaaatttggctgtgatacttggaacctcactaataatcaggactgatgtagaatatctggtgatttgggagttgtctggattctttcttcccgtcccatgtgttcttggaaaaggtgtttttcccaaatagaacaagatactctttggttaatatgtgagagaagcttttggactttgatgatctgatggaggagatgttcttggtgactatctttcgaatatcagaaaaaaaaacaaaaaaaactaatactagccaaagtaaaacatatctttggaaacactttcctttttctttgaccgaaacatattattttcttcttctgttatttaaagccaacaaatgacctggagaaagccacagcaatggttgggtgaggttgttccattccagcattcccagtaggattgattgaagtcctttgttggaacagccccattcaggcctttttgaaagggacctcctgagccttgattttacttttctttggatagactattttcaagtacctagtagaaagtcatatatatatattgggatcattgtattatgataatgtttctctctcttaagctaacattttaatatggattctatttgtttgaaagtaagcaatatcttctaatgagtcatttagctccatatttaacctatgtataaagtagttgtaagttaataaatcttgaattgattgataaaatatctttagcaaatattacccagagagttacaggcttatactgatcagttttatgtacattttatgtacaattgtgtggcatgagaaaatactagaaatgcattatattaatgctggaactcttaccagtcctggcaatgcaaattctcattttgagatttccatctagatattctaccatatcaatggttgtcatagtagcagtctcaattgagaattgtgattatatactttatcaaataactacttgatgaaagctcaattattctaatgtagttcagccagaattctgagccatcatcttgcctggttaaggaaataattaagcaacctaaaaaaaagatttctttctttctgttgaattgtacaaattttaccgtatttcactgactgtagggtgccatcaggtgtaagacatgccattactttatgtactgctaagaaaggaaaaaaaaaagcctaatagttacactcatgagatggcatcaattaaaagacacaaaccagtttcagagatgttaaagtggcgagggtgggggaggcacaaggaatctacagtccataaaatatggcacttacatatgtacacagagttttagttgggtattggtcataatcatattaaaatgtaaagaaaattatattaagtaaataactatttctggcaaatattatacagattttttaaatcctagaaacctataattggaaaagataggcgatcatgtagtcaatacacctgaggaaatgtaccatgagatcatctagagcagagttgtctaaccttttggcttccctgggccatgttggaagaattgtcttgagccacacataaagtatgctaacactaaggatagcccatgagctaaaaaaattgcagaaaaaaaaaatctcataatgttttaagaaaggtggcgaatttgtttgaggctgcattcaaagccatcctaggcctcttgcagggccgcaggttggacaaacttgatctagagtatgtaaaacttagcaattggttgcctttttttattgaagtatcttcaactttacaaaagaaattataatattcctttaaatagccatcttcagagtatctcctggtaaactttatataccccttttcaagatcacttaatgtatggaagagaataatttgggatttagatgagtagtttagtattccaaacaaggtgcacactgagacacagtgtgtatgtaagagctataatcgtcaaatgtcatggtaagtgccatatggaattttaaaaagaatcatcgttccctgccttctaagaattaccacattctacctttgggcattcctccccaccccccgctcaccccaaatctaaagtacaattcaaggttaactggagctctgtgtggtgaaaaggtggcttaatgaaactgaccatgaaccttatactgtggacagcactgaggtatgccttggccaaatacttggccttagttatcaaccttggtgctggaattcaaactgggtcattgtcgagagaggccaaattgagttgctagtgagatatggctgggtggctagatgggctccttgcaggaggctgtctcaggaagtgggcacagcagtgaatcagccaacaggtggcctcatggaggtttgaagtccacaatgggcacccagcctgaagtgtgggttcaagtgcaggtttggaaataacactgtgggatttggacattgggtgtggaccggatcacagtgcacagcacaaatcttgcttattattgaaccttccctgcaaaatcagattcacagcaaaatgggacctgcttggcccataggtggggctagaggaagcctgcagataggatgaaatgtcagtagctgtgcagtctgaaaagagtacaaggatgaggagctagattaatctttgagattttgtgttttagatgattgcatcacaaacgtttcctgctttgggcacaattgctgctaatggtgagaacttacctttgtagactgtttttaactaaagtgctttcacaaaacatataatcttgccttcacaataaacctgagggagaagctgggtctaattaccccatttggcagatgtggaaaatgaggctcacaaatactgaccttaaggtcacttgttgttagctcttgcttttttagctatgctatgcttccagcgcttgactccatatttatttccaaatttagaaagcatatatagtctgttttccagcagcttctgctgactttggggactgccaacattttgttgcttatctttttacctcccaaatcaaaagcataatttttgctcagtattgaagggacaaataagcaaaaacaaaacactattccctcataacttaccagattaaactactctcctctgttaggttatgttaatcatttttggaagtgataggtatttcttcagtctaccttaccttgtttaaacctctgttaacctcactgctgttgctttttagcggccttgtagtaaaccatgtacaagtccagacaaggagtccagagttagagcaagttaaacaagagttgccagcattattagttgttgacatagaagttggtgttaaccgtgaatagctggtttctaactttattttacctggagagcctcttctgtttttgagcagcgtcctcactgcagttccttccttccatctcattccacaagtatcctttcagcattcttgcctgtagtgtgcccctacaggggtgcagactacatatgttcatggttttcatctttgtaaactttaaaagaaagctcttcttttaaagtagattagaaatatgacaattgagcattctgtaagtgtgtgaggtaattactgtgagtgaatattagagtgaatgaagcaaacaacatgacaagccaggagatccgcctcgtagtccaggtgttgccccacttctttactgtggaattttcacaaaccccttatacttctgacaccagttgccatacctgtgaaaaaagagttgcattaaatgatttctggagtcccgttcagtttcaaacctcattcaggtctgcaaagtgaatatgtcagattgtattaaataaaggtaggattgctgacaaaccttccagtggtgaaaaggatgatctaagtgagcttaaattctgtggataattttgttattattgggaattgaatggaaataggttaacagtgattcagctttctggcaattataaaatcaactgaaacacactattattagctaactttttaagtttggtttctagtcttgctcaccgccgtatgcccaacacctaatacactgcatagtcagtatgttttattttgggaatactttcatacaaacttgatggacttcttggcctatttacctcattagggcagacagctctaaaattcaggaagtgtagaaacaagtgataaaatgcctattggaaagaaattttaggagtaaaatgtagcagtagacatcaggctgctatccttttttacccttcaacccagtgggtgatgtttctgggttacagactcaacagatggagttttaactatttatgtttaatcaaggaggaaaagaagccataatttgtatttaatgtagtagactatagaaatgaaagaataaagtgataccaaaattttgtatattcaaatcaatcttatagttttataacattttaaccctaacattttattgtattttgggttgcaattactcatggcagatgaaagccatggcttctctttctagaaaaataaatgcacacatactgccaatttcaccgacagcttgaggagtttcatgaacttgccatcatctggtggtccctagtctgaattcttgatagaaaataacctagtatgttcatgtatacatatgtaactaacctgcacattgtgcacatgtacactaaaacttaaagtataataataataaaataaaaaaaaaagaaaagaacctagtgtgttaaaccttaaatgcccttagaaataacctagaccagtgtttcttaaactgtggtcatgagatcagttgaatggattatgaccaacattgaaaagaaaagaagaaagaagaaaatagaaaatatcagagtgtatatcataacatgctaagagtaggttttgttttttgagccatgtctttccatttgtatgcctgtatgtgtgtttatgtttagtactaagtcagaatataaaatgcatttcttactgtggattgagtgtaaagtttgaaaaacattcattctgggtgaatctctttcatcttatagctgaggaaaactgaggcccttaaaggctaaatgatttgttcaaatactcgcctttctctattttaagtggcccagccaggactgaactagattggttgctaattttaccatgctacattgctaatttgttgaaatacaattgtgaagtagaccatttaaaagtactaagtgattatctgcttcatagttgacattttttaattccttatttttcctgccgaaatcatcactgtcattatcttttaaaataattggggctggcgcttcctttccagagaatatcttggtccctctcagttggctgtctgcacacctcaatcctagaatttgacatttggggcctaatcagaagaatttcagaacaagatgtgaggggttgttaagtttttaatgtccaaactaaattaaattattttgagttattttcaattcacttaatagttgaatgcaacatatggcaccagatgttggtactggatcattgggaagacatctagtagtcagtagttatctatgtgaagtttttttcaaccttgaatactgtatgaaatgcagattctgatccagagtctggctgagattctgggtgactaataggctccctgtagatgctgctgctgatccttcaactacattttcagtagcaagaacctgcattacttgccttattaccgtggtaagaaaaagtagccgtcagataatttttctgtcttgattttaaacagccatgctcatcagtccttacatacattggagtaataatgcccttctttgtagcactcttgtagatgattcagatttagcgctacttcatttaactagtattgtcagaattttctacaaaacttatttttctaaataactgatatctgtaattttagaaaacatgttctacaatattgcatacttctctttctcaaactgttacatccactttactttttttctttaacttagtggtgtaagagccatgtgttttggagacttcttggtgatgggtattgagccatatgcaaaatgagtaaagatcacaaacccttctaagttcttgtatctgtgttttatgttttttctattttgtctccatccagctaccaattaatagtatgtctgcctaaaagcagctggtttccctttccattctaattgattacttctgacctgaaaagccagatactagatttgttagaaatatttatgagattaatcccagtcagaaaggcctacctggcatgggagctttcctgcaaggaagtggtcaaggaagttcagtggcacttgagcaagagagaaatcctttagtgttaaccctattctgaataattaggtcaataggagcttacttgtttcttcatgactttctctatgtgctttttaaactggtttctagatccctctctaacattgtgtgttaaagtgtgtatgaagatgatttggaggtatctgtatgtgtgtgttctgctgttgagaacatgataatcataataaataagcagtgcttcaggatccatctaaaatggagacaggtaactgtgctacaggccctggttctcttacagaggctttgcaaatggttttaagaataataataacaacaataaagaggatatttcttggttcaatttagtgttctagggatttaaagactgatttctggtaaccgcctttagcagattattaattataacaataacaatcgtaactcttatttgctgagccctcactgtgtcaggtagtcattattcagacaaatgttaaaacaaggagggctgtggtcatgaagggtgcatttgcctgaggggtagcaaatggctgctgtgctttgaacaaatgagcgtgatccaaatagataggggtgagattaaatattttaattagtccctctttacaataaataagcatatgcagaacctattgccggtgtttttgttttttttactcaccaacgctagaaatggttggaggattcacacctacaaaaatcaaatggtagcttatattcttctaattcaaagcagagagaacctgtttgcattttaactaggtggaatccgaacatttatcattttgaatagccttgttatttgttctgtcttagaagttgtggattatattctttaaaattaagacaagactaaatgtagccttaacagttaagttgaattttgagatcctgaacatggccccatctgaaatatttttagtgaattacagcctttgaacattgatcatcagatttgtttttatttgaatcttatttttacttctagagtttatcttatgctttagtgtacttaggtgtacgggtataatcttaatctaattaacagtattttgtgacctgagacacctgtcaaagaccattatagaagctagaaaacattgggaggtaaactgaacacatggcctcagttctcttctttagcactagactatgacttgcactcaaaagaggctaagaaaaagaaaaataacgtcctttgcctttaaagtgtaataaatgtgttttgctattaatagcccttttcagtttatagactggaggattttgttttaagtatttgaaactaaatgctgctgggaaaaagattttagtagaaatatagatatctgtccctaccctttgttaattgatcctgcttaactggggacataatgtatgtctactgaagagaaatctgtgggcataaactcctcccttcctgttgtcaaatatatttcatatgttattatcttgtttaaatatacagtagacaagaaaatgcaactgctgttcctttaatatcagaactatgcatgttacaataggtgtcactgttttgcttggtccaatcatgattggtgacttcagctattggctcggagcactggctgtctgactccatctgcagggctgtaatacctactctcctccgatccattcaccacacaacttcagccggctgaacagactcacgcagctccagcccatcttgctgacctaattcagaaaagaagtgctacagctctgtgcctgtcatctttgcagtgtagcattttcaggtgatctaggaaacagttatttttatgagcaaataagagaaacaggaatcatgatggggatatatttaacagacccagtactggataaaacttaaagccagtttctattcaacatagtgaaaaggtcaccttgcctggctgagaaaagcagcaaaatatcagctttgttggtttcagttaacctcttagcccgggctaatctcttttccttgatgttcaaaccaatttgggatatctaactctaaagagagacacactgtactcatggtagatgacaaggaaaagaacatgaaatgtctcaccttcttcttgatgcttccagagacggtaaagaacaggtccaagaaaagctcaaagaaagcaaataccagcagcagcagtagcaacagcagcaagttgccaccagtttgttatgaaataattaccttgaagactaaaaagaagaagatggctgctgatatattcccccgtaaaaagccagccaactccagcagcaccagcgtccagcagtaccaccagcagaatctcagtaacaacaaccttatcccggccccaaactggcagggtctttatcccaccattagagagaggtaagtgccgcgctagtctatttactttaaaagttttcctgtgttgaagtttctgcttttgcaaaacctgtaatgtatttgaacacaaatctgtttcctcttttcccagaagctttttattggtaatggaaaattgccttgtatcttttccaaaacagtacagctgttttcctcttagataaaaatgtttttgcaagctgtaacattcaagtgacagggttgtctatgggccatagaaaatgggaaccttttatttgtccttagctttattaaaagtttgtataacttttattttaaactttagttacttcccttatgtttgcaatgattatgaacagtttagttagaacctttatttgttgttttgccttgaagttactggactgttgcttagcttgcaagtcttttgtgggttttgtatgttggggaaggggatgttaaaaatgcaggctgctgtgaattaatgagttgcctctgtttatagaaatgcgatgatgttcaataatgatttgatggcagatgtacattttgtggttgggccaccaggtgggactcaacggttgccaggacacaaagtaagcaacagctgcatgaccggtttagtcctgacgtttacaaagagggaccctttccataagcctgtaacttggtgtgggcagcttgccgatgtcaggcagtgcatgtttcactcgattagggagagagcgcaccctctccagagggctttggccacgcttaattttttctttgtttccttctatactgctttatatctcacacatcccctcttaactctccagacatgggaagttgttgtgacaggtcaggaaagtcgtatgtttacccttctcctagaaattagttatgtaagctattattgtatgtatttagtaatgaggggacatgtgcattaatctcttaaagctttgaaataattagcagcatggtcttatgcttccatggcaagctaccctgtgtaccttggctttttcaaagcagtagattttaggtacgctatgtttactaaacctgattgcctagtgttgtttttctgcattgatttgctggaaatgccttcaatttagtgtatgaaataagatttccctttctacacagtatgttttagctgttgggagctctgtgttccatgcgatgttttacggagaacttgcagaggacaaagatgaaatccgtataccagatgtcgaacctgctgcttttctcgctatgctgaagtaagcatcattcgtgtgtttggaaagagtttgtttatgctgtatttgtaccctgctggtttcacagttaaatttaagttctgcataacagaaaagaagactgatgaagaaagagggtgctgcttaccttgtaaatgttttcggaaaagaacactttagctttccgtggaaagcatatggaattatgcagcatttataatcgcaccttgacgtagaatttgggagcaagtggcatgtatagtgatgatttttaacaacttaaaattaaagacaaataactttctggtattagcattatttaatagaagatgttctctctgaaagcattgtgtgtgaaaaagtctttaaacaaatgtttttgcttcacaatttcagaagttaagtaccttatttaagtaacaccagttgggagatttctgagtattctaagagttattgtctcctaagagcaaatgaaaaacttaccatctgttgaaataatctgatctttgtgtacacatacatatacatactcatataaaatcagacactctcaagggtaaaaagtacttgcatttgacattacaggggaaatcttagaaagatatggatagtctcgtacagtttcatgtggatttatacagaagaactttcattggtaatacagaagtatgaaacttaaagatacgttatatatttataaaaaagatagttttctgtctggtgggtcttctgcaggcaccagtatgtgttaaacaggttatagaatcagcttctttatcatgtacggtactagacagtgtggtagttcaccaagtgatcataatctaattattattctaagtagtatttatatgatttttcctaatctttattctagcacagcaaagtgtattactttaaggttatctgttgctctagggatttcagttcattggaataagtaaaatgtttgttgaaaaaagtattcagtgggtcaacaagttggacagtactcctacatatagttaaaatgttgccatacattgtttactgtcttctgaaaaataagtactgtagttagttctagaacttaaaagtatttaattcattattcatcttacagttttgaaatataattgtcactgacaagaccttcacagtaggggatagggaaattaaaggcaagtgagcatgtgaagtaccaaaatgtaaactaatctgctacttttaacctttgtaatcttttggagatatatgtacagaaaccagttttacctgcaagtatccccactgcatgaagtcagctttgtattttttatagtgttttctgttgctgaggagattgctagcactagttcagcattttgtcttcactgcagtcaagtaggatgttgtatcattcctgatatatacataattaggaaacatgaacaagaatggcagagaattacatctcacctaagtcatttgatgaatcatttgacaagtatcttttcccacagatgcattgcctatagcagatattgataaagctttataaaattatacatgcagtccacaaaatgtggtaagatcagaaatgagtcaggtgccatttgctctagtgctgtagttgtgaaagcggtggcctgcttcatcgagtatgagtagccagtattcctggggttgtcagaaaaagaggacagctgctcccttgacagttccagggtaagagctcgaaagtgctgaccatgctctaggatcctccccagggtcctggctcacagtcagagcatcactgagccgcaggtgtactatcaagtggccttgccatcagtaggtgacttcgcctatcagagaagagaaaggttcctgtgagcaaaaaggcaggtttcatttgtgctcgtggacatttttctcattgccattcttgtgttttactttcttatagaagctgttgctaatttcttaagttttatgtgtttcactaaggtgaaatacaataactaaaggaaaactcaagataaagtagctgtagaccttaggtagaagagaagcagatgatgactacctttacgtgcctctttgggagactgccactgtctcccaaaaagtgtatcctgtgaagtgttttatatcctgaaataaggacagttcacagaagcacaggaataatacatatttaagctttcctactttgtcttttaattaaatatatctggaaataatgtaatcttgaattctgaaggtagaaggaatgtgtggagaaggaagagttttgagtttaaaaaacaaaaacaaataaaaagtctgttggattctatgtaaagttaactggacgatagcattgcagtccatacttttgataatccattgaacttggaactatttggaaaatattaatctcaggttttattttgtgcttaggaaaactccaaaagcatgaagatgcaataattgctcttaaaacataacgagactattcttggttaaatataatgtagtatatataatagaattttgctatttttttgtaatgttgactattcaatatgcagttgtttttcagtttcaatagcttctgttttgttgagatgacactgaatgcagcttataaaatagaggctagaatggtagcacaaagttaatatctttaattatacaaactttactactgggttaaaatattaataatttattaatatgtttcgaatgttcctttactctgcaaatatgtttgtattaactgtcacataagatgatgttctcagaacaaacttgaaagtggttgtatcttttcttgctggatgtactcattttgtgaaaattccacttacatgttatgtgctttttacagatatatctattgtgatgaaattgacttggctgctgacacagtgctggccacactttatgctgccaaaaagtacattgtccctcaccttgccagagcctgtgttaatttcctggagaccagcctgagtgccaagaatgcctgtgtgctcctctcccagagctgcctgttcgaggagccagacctgacccagcgttgctgggaggtgattgatgcccaggctgagttagctctcaagtctgagggattctgcgatattgacttccagacactagaaagtattctccgtagggaaactctgaatgccaaagaaattgtggtttttgaggcagctctcaactgggctgaagtagaatgccaacgacaagatctggcgttgagcattgaaaataaacgcaaggttctaggaaaggcactttacttgatccgcatacccacaatggccctcgatgattttgcaaatggtgctgcacagtccggggtattaactctcaatgagaccaacgacatcttcctctggtatactgcagccaaaaagcctgagcttcagtttgtgagtaaagcccgtaagggccttgtcccccagcgctgtcaccgtttccagtcgtgtgcctatcgaagcaaccaatggcgctatcgtggtcgctgtgacagcatccagtttgcagttgataaaagagtgttcattgctggctttgggctgtatggctccagctgtggttctgcagaatacagtgccaagattgaacttaagcggcagggcgttgtcctggggcagaacttgagcaagtacttctcagatgggtccagcaatacctttcccgtatggtttgaatacccagtgcagatcgagccagacaccttctacacagccagtgtgatactggatggcaatgaactcagctactttggacaagaaggcatgacagaagttcagtgtggcaaagtgactgtccagtttcagtgctcctcagatagcaccaatggcactggggtacagggagggcagatccctgaacttatattctatgcttgaaaactcacttcctgaagcagcttgagctccaaagtgcacatctggttccaacttgcctgatgcttagctcatctgcaaatatgtgatcagtgccggtaatttgtaatgaatgaagcggtaggcaggttctaatttcttttaaccttttaattatgtacaggcaaaaatgcagcattccgcttttaactatctgcttaaaagagctaacgttcttattaaggctttgtggtttttagagttgcatctatgaacctggggagattatgtgctttcccaagcgttccaccaccctctcagttttgtccctctgaagataattttggatcaccttgaatttccttttggacgttatttgatgaacagaaataaagtgataacaagagttatttttaaacagaactcctcttaccccccaaaacagataaacctcagtgtacaattttgaaagaagttttgccttgtaatgagtaataatttagaaagtagacagtggttgtgtttggctctcgttttattccttttacatttgttgcttctgggatttaaaaaattactaaattcataagatagttaggtattaaacacttcagaatatcaatgtaaaattggaaaataaggaactgggggcatttgtttaggccatgacttctacaagcagatttcttttcttttagtttagaagacaaaaaatttcaatacagatacttcttttagaagtaaatttttagattttattgtcagtagaaaaaagttaaactcctactaatttaaactaagacagtttaaaaaggaagcctgaaaaagactcatactacaaataatttaattgatggcatataagaatatgcagtttgaaaaagccaaactcttctctccacttagcttttgatccccactgtttgcttatttgtataagtcatactgtgtagaatttctattttctttttccccattaaaagaggaccaaacaattctttatacaaatggagtagcaactagttttgtagcactacatttaatgtaatgagatacctttgttcatttttttaaatttgaaatatactttacctgatccactttgattgtatactatattctttgttaattttaattttgtcctgttcctagactgctagaatctggcccctggccatcttaaagtgccaacatatgcctgcagggtttataaaaaatggcctggagtgacacattttattatacctaatattcactgcatcagtatcacatctagctcccttacttgtccacagataatgtaaacaaaggagggaaaaacttattaaattctccttcgctgctggcttgtgctggtttagtgcctgtgtccctggcagtgtccagtgtgttcacttccagttgaagtatccatgtgtttctgggcagcttttctgctcagtgtgatcctgagatggcttccccgccgccacccagagtgtggtccttggccgcctcctgctcctgctctgcaagcctgaaactggcttgtctggagccaggagttagtcctggggtgtgtgtgtgcctgcgcacccatgcgcatgcaagtgtgtttgccagctcaggagctgtctcctctctacctggctagtaagaggtgggacagtaatggtcctcctgctggccccagcaaggcccatgagtgactgccctgacgtattcactgtgcctctgggccacttcttcccctgtagatgtgggcttgttgccttcagccggcttccctgagggaggagaacactggattattggaaatgttttaatcactcttgccattacctacatctattagcatagatgatgaaaagctgttactggtgattatagatgagtatttccaggacaacgttctaaaagtacaattatttcttattggggagattacaggtagtttggcaaagcattgaagtacaaaggtacattttcaattaaaaagcacacttctacaaaagatttggtttttaaattatggttacacatttcagtaactcatagctgctgtgcaaattggtagaccttataagaaggcacttgtttgtaagccagagaagaaactttaattgcatcctatcagattgttgaggtgggtgtgatagtcttcaggtgcagtgcgttcattcactaacgctcactgtcagtgcccatgtttgctagctgcctccatgtgactagtgagctgctggtgaaagtcgtgtgaaatcctgtacactgtgtatagaataatgtaattttatgttaattgttattactttaaaacatatctaccatctgattggctggtaccgagagctgtgggtaaaatttgaaaattgtatttagaataagaaattttacattttaaaccctattgtcctttatgcattttcaatgaaatggaatgaaggctaatatgcttgctttatttacttttgtaatcttggattttgtagcttttaaaactagaaaccattgttctaacaaagcaggcaactttattctataaacacaactttattaagcagaatacactgtagatgcttttccccaacgtatctggctggcagtctttgtcgttgttcattctggggataaaggggaactaggctagcagttctaatgtgacattctttaagcatatcttaaaatagtatttaagtaaatggtctaatttctacataattattgcactgaacttttttgtttattaaggtgtttaaataagctcagctaattcaagacactgtagccacttgtgcatcagtgtgcttgaatttagtagcttacagcattatttatgaaggaaaaaatacataaatatgaagtacctcatgttgaatgttattgtactgtatttttaatgtaacagtgcagatcttgttagacacatgaatgtgtataatcatgttaaatgcaaataaaactagttcatagatttgttttcctttagtgcttttgtcacacccttgagatagtaaaaaattcatgctggcacttttgatgcccactacgttttgcagagatggtttcgcagaggcatttgttagctaagtgttcagatatctttgatccctaaagaagtaaaaatttgaggcaaaaggataacagaacaatgaatgtgttaatcacttgcattgttcaaagcctgactgttaatgagagggaatgaatggatgcatttatatttctattatggaattcgtggttggccggtattctgaagctatagttgctcaaatgtctggatcttcctgtgctaaggggggtgttgatactgaatgacatctggcttctgatatgaccaatgctgctttttcctttgttacagtagcttaagtctaggaatttaaaaaatggcacgtaagaattttgaatatagtttttatgtgctcaactagttttccattatatttctttatatcaagtatttatatacacacatccacataatcatacataattatgaacatacacttcttttttctgcagtttctgatgcttttctactgcagtttagtgtgaaaccctgtatatttgcttaaccgcttcatctactcgggattcagtttccatagcatacttgcccagaggagttttggaattactccaaagaacaaaggcactggaactccccactctcatcagtttaatcacagttacaacctgagttgtaagatctttaatcccggaatgccttagccattatctcatctttgttgccacttaatccatatatgtttattttcattattccaagacaattgggaacgatcctccttcattgttgggacttgggatctacgtgtcgaggaaagtacactgtcttctcagtcgactctataacttgcctgtgaaagccatgggcttacacttggaagaaaacaggaaggagaaaagcatttctgaggacctaaacggtataaaatgtggaggccaaaacaagcaagttgccctgaaaacctgtggttaagtgtttattagagcagggttttgagtgcctttgaggtgcttcggtgaagatgaacacactttgtggattcctcgttagtacatttcaacatttttatggagccatttacatttattgaccaactattccctttgctctacacttcccttatcctcttcttttcagagtatgtgttctaaaaactaataccagggaaaatttccaaaaatagtttcttcatttatttccataaccaacataaacactggtgaaaagtttctcaactaagaaattgccaggtaggtgagatggaaatacctgtgaagaagaagtgaagactgtggccgaccctgccgcacttcaagcagtgtaaggcactagcagctacagattggtctccggacaacgtttgggtatactttccgaacttgggcatctccccctgttgcctcttaaacttttttgagatgtgaagggcagtagggaaagtgtaattcctatttttgccgaccctaactatcctcctgatcgttgtttacatgcccatctacttcagtgtccagtggacagcagttttactagcagatgctgctgttttatgctctgccatctaaaaagtccctaacctcaagacaggtagtgagacaaaacaacccactcttggtcaaacctgtactttaaatacatctgtatgtaggacataataaaagttatctatgagactactagcccttaaacaatactcttaagatctctctttaagctgttggtagtaatcagagtgggcatgtgctcaaagttactatgaggatgatgtcctttttcacttcatgtgacaacagtacggaaagttacttcaaattaagacatttttgtttttatgactggtgggcagttttatatttaataaactctctttgatttcaatggttttagagtaaaattacacctgaaagaaattaaagacaagtcatactagtggcctccatgttagctttgacatggagtgctgcagcaaatcagtgagcagcctgaactatgaagactttcgtgagaaacaaggaaagtctataaaatattttgatatgtagcagcctttactgtggctatacaatatgaagtttcttccctaaactatcttcgaaaagtcaaaagaaagatagtgactagggaagcacaaataatctttcaaagcttgaagcagagggtacattctgttatactgtagaatatgtaaaaatgtgcttttgagagacattctagctgtcttagggaattttcatttttgtgcttgtcttaaacagtactaaactttaaattatttcagcaccccttataattgtgttgatacagtgcattgaacgttaatcaattcaaaattaaaggctgtcgtagctcttcagtcttcaagaaaaagtccaagaacatttggaggcattaatggactgaagaatatattggttttttgcataattgagttccctagaagagacagaaggtttaatgaatcattcaagggatcaacccaccattcattcattcaccaatcatttattgatcttttgcttcatccccggcagtcacagagatgccggagagtcagagaccagtaagaggtgatgtggcttgccttggggtagaacagtaagtttcccagaggaaatgatgcttaagttgggttgtaaaggatgcactagaatgatctttgtgaagactggtgatgcaaattgtcatgaggggaaagggggatgaagggaattctggaagaggaaatatcagtggggacagaatggcagacagcttaatacagttcagtaaagggaacccgtggaagaatgaggccacctactgtgtgccaggtttggagtaggatgatcagctgggcagaggcatgaagtaagcacttcgtgtattaggctaaattatctggcttttatccacaaaataaatcagtgacatagagatttgagttacagaaaacaacagttttgtgttttagaaacagccttgggaacagtatgctggatcagactggaggaaagaggcgcagtttgggctgagagatccatgccaatgccagtgaaggccagaggggccagggatggaaagaaggatggaggtcttagaagtgtggaggggagatccccagggtgccgtgtgcttttcaacatccagtcagaaaggggcttgctgaagtgggatgcaacctcttgccttacatttatcctatggagagggaaggcaaacagttttttcctctaccatcctctgtagatagttggtatatagatatccacccttgattgtatctttacaatcttttaggaagaaggtaaaacaagagtcgacagggtagaggttaatagctcaaatcctagagccagaccacggcctggttttgaccatggctctaaccgcaggtgacattggaaaagttacttcacctctctgagcctcagttccctcaagaatgatggcagtaacaatagtgacttcctcaaaatggtcattatgactatgaaatacattatttctaaagcactgacaatagtacctggcaaagaggaagtgccacataaatgttcattaagtgaaaaaatgttaaaagccacagattaaacccatgcatttgcctcatttgcatttatgagaaccagtttacttatagtttatacctacttttaacaatttggatcaatgcagacaattaaaaagtgattttgttgcttttttaaattactgtggtcaatagggagaatataaagctacagagagctgggttattgaggaattctcatactctaaccaaacttcttataaatatttcaattttgtcatgttaatgagagatagaaatgatttattctgattagatggattctagcacatcagacagcttctctgctagagaattgtgtaggatttttcagaaaattactttgtaagagctgaacgtgtgtgtgcataacaagtttttgagacattttccaagaggagtctattttgcagggaaaaaatattaatatcacctttactagttatgctagagtcaaaataaggtctttttgtggcctacagccttacgcaattttagatatagtgccctctacaaatattttgagattgaaatcagttttagcattgactttatttgttatgtgttgagggcaggtttgacctttattataagtaatgtgaatgttacagggaatatttgaatggctaattgtttttattcaagtaaacacaggtgtgcccgaagcactcgcaactttatttgggtgtccccatggttgttggtacttcatctctgtcttccccacgaatgtccccatctgcagtctcagttcatgagccagcacttggacctcatttccctagggctctaccatcccagaagctaattctgtgtccccttttcaggaccatattctcctctgttttgcaaagtaaacctgtaagagcatcctccaacctgtccccagagattctcatttaggaggtcttgggcacagccagtcccatttgtttacatgaagctggagaggggtagtcaggtttctgctaatgcgcgtgaaaggttgagaaccctgatgtagacaaatcctggaaccttccttcgatgccacatggacttccagcttagcactgtgattcttgctggggaccctggcaccacacactctgagaaatcagtctggtgcttataccctgaacccatgaccctggagccaactccaacaaaaccaccatctgcatctgggaagaacagactggatcatgctggaggccagaggagcagttagggcggtgagagccatgccaatgaagaccacaggggtcaggagatggggagaaggatgaagatcctagaaaagtgaagataagctacccagggtgcagtggggctgattatcaaaggcccagtctctgactcttaactttttgatcctgatctctgctagttgacctggctcctgcctgttcatctccctataccctcatccttccatctgcttctcagagggccagagatccagtctgatcagcagtgtgctgattctaactcatgcacttgacatgccacctacttaatggtctgatcaccatgaactggtcttagtgcctgcctatgcttgggactgtctctgtaaccattgcacttcctccagataggtgctggcctgcagtgcatcctctcccagcctccaaacccaagctgacttatctgcccactaggcttcacggggcccctgtccagcctgttctctagccccagtctcttgtctttttccttcttgcctctgacctaccacccagaatgtcaaaattaaaatacatttgtgtcagctttctgttgcccacgtaatacaaaacaaacacaacacctcagtcgcatattgcaatgcagttgtgcttccacaggtggtctaggcagctttgcaggtcttgactgggtttactcacatgtgtgagggttgactgccttctgctagggcaggtttactctgattgtctcatcctccagcgaactagcccaagcacatcttcatggctatggtggaggcacaaaaatgtcacatgcaacaggaagaaacacatatggcctcttgaggctttggctcacaactcgtaaactgtcacttctgctgcattctattggccaaagcaagtcacaaggcctcccaggtgcatggggtagagaattagacttctttactgataagtgctgcaagtcacacagacagggctgtgggtacagagagggatggcatatttggccatatatacagtcaagcagccacaactttaacctaggcttggagaagcctacagatagacactctgctccttttcaacctagaccctacatttaatgccacttgaagttatccacagaaaatctacttgcacaaaaagcgttagtgaactgaagattttactgaaggttttatagaggagaggaggagaactctccctcatactcggcataaactgtccaaatatccatgtggcagttctcctcccatgtaactagttgattctgctgataaaagagttgcttctcaggccccaaccctccagccagcatagctgtagcttttcactggactgtgtctcacccccaagctctgactcctcaagctggaacttgcatttggagttagtaaacacctcattagatataatttttatcttgtcacttatgaccttacttccattctcacatactgccctgctcgcatcactgcacaatttaactcaggaaacctggccctagtaaagcaaaaaaatgttgtggaggtgaagaggaaggatcttttctcctctgttttattactgttcacagcaacaccccaaaggaaaccttagatggtccatgtgcttcttccaggaagatggggcgagactgtgtgctgaaagaaaacagctcagccaatccttggagtcagagagaactgcagaaggaggattggctggaagagggaggaaggatggggctcaggttagcaagaagcctcacacagctttttacttagagcttctctcccatttcttctcttcagggttccttggcatgggcccaactcacagtgttcaacctgggaaagctcagcacatggggaaagtctagatagggctagttcacaagtcgctggtctgggcacatcatccttactcctaagcagtgtttgacaaggtgttccttaatcttctctgcattttgtgaccatatcaccaagggcttctcaacagaataggtttcttatgtgactttcctacactacaccgtgtgtcttggttccctttgacaatttccacatgcatttgcatgtcagctccttgctctgtggtcttgggggaggtacaacaatgccgctgatcttgtttgtgtttcttccctttctgaagcacccttctcttgccaatggccctggaaggaagccctggctgctttctcactgtccttccacagaacagaaagttttaacttctagagtatctcagatcctgcattccttactgtcctagacagttcagcctatgataacaaaataactaactaggtggttgatacacaacagaaattgatttcttacagttctggggcttggaattccaagatcaaagtgccagcagattcaatgtctggtgagagtccactctctagttcgcaggtggcatcttcctgatgtatcctcacagggtgaaaggggcaaagagtctcgcagacttttttctaagggcactaatccattcatgagggcttcaccctcctgacctaactacctcctgctacctgaagaccccacctcatgataccatcacattggaggttaggatttcaacataggagttttgaaagcacagagacattcagactatagcacttattgaggaatcatatttacttattaaacagccaaaaagtcaactacagagttgctaaatcactccattccttccccaaatttgagattttatttgccacatagatttaccagaaatcaagagagggcagcccaagaaatttaacttgtttgggctttgagcacttattttatctatcttaaatgaagatatatttaacacttatcttaaataaagatatattaaaatagagcaattgtgatataattcaaatattttcaagtgcaccagtgagtggttttacctcctataaaaatgccatgactgtaggtacagttgtgttggtggtagcattcaatgtgaatgggagtcacatgccatggtggcttctcagaggttggctccatcactcaccctaatcagaaaactagggctgcagttgaggacagatctcttcccagctgcggaatgttaaagcttctcgcctcctttttgttaccctctcctgctacattcaggaggaacccatattcccataaagacaaacaccccaagaaagcataaccaagcagaggtagttacatctatttctgatatggtccaatgtatacacataatatatgtgcaagaaagctctacttggtattttttggatgtttgtggtgggtcttcttgtcattctttaatgtctcatttacggagacagagtccaggtagtaagtggactgaactctttcctgtagttgcaaagaaacacccactgtgtcagttgaacaggtattagatcagtaaaaccaaatcttccatatatgcaagtcacattggcctctgactcaagaaaactccagaaaggagcatggatgtggcctaactagaaacaggatagtacaagtgtcttagtttattttgtgttgctgtaacagagtatggtaggctgagtgatttataaagaaaataggtttatttagctcatgattctggaaagtccaagagcatggcactggcatctgctcagtttctgaagagaaccatatgctgcatcaagacatggcagagaagcagaaagactagcaggtgtgtgcaaagagggacaacacatgaggaagaaacttgctttacaacaacctgctcttgcagtaactaatccattcccaagagagcaggaactcacgcattctcacaagacagcattaatctattggtgaaggatctgtccccgtgaccacaaaattacccattatgcctcaccttctaatgctgctgcactggcaactaaacttcaacatgagtgttggtgggaacaaaccatatccaagcaatagctgcaggcaaaataaatcatgaaaggaatgggggtggaaaagggagtgagcacagagagagtagagaggagagagagagagagagagagagagaaagagagagagagagagagagagagagcatgagccagaccatttcctctgagatgcaaagctgttggaagagggatgaaggaaaggagtcagcttcttttgggtgaagtagggggatgtcgcacagtgacaagctgccaggggtagggaggtgtctctgttagaccttggtggcctactgcccaaactctgtaaggagcctttgtggatttgccaagccttggctggagtcccatgaatgatctttgtagatcttttccttggggggttttcagctgctgggcctccaagtagggcctggagtgcaggccagatccaccagccattcaggataaagagaagaggcgagaaaccaggcccctcctgactcctctccacagagcactgccctcaggtcttgcagcagctgaaaggatgtgcggggtttgttcctcgccacaaagtgcccggtcttgctcacagcagcctgagaaatatccggagtccagaagacggtgtcaaagtttctttcctgtccgctttgctgttctctcaggctgggtagagccagcctcacatggggagctagaggtcctcttggatacactcacccctcctttctacccttcctgcctcaggggcctcaccagtgctgctcactgacctccctttatggcctttggacttgggcagcctgtcccacttcctgcatcttcatccccacattgatcagcaaagattgaaggtgaaagaacattatcttgcagaatggcactcacatctcaagctaaaagactgcttcacaacaggtgggagagtaaggagggaccaggctggtggacgagcccgtgggggccatgttgtcacaatgatggagacgggtgggaagaaacagcttaatgtcaccagacacatgacaagtggcttcttacagcctaaataaataaaatgagccaggtgttgggctttgccatgtgactgtcatttgcacaggagccatgcagtttacccaaacccctgctaagtcaccctggttagaaaaacaaattatcgtgtgtcgtcagaatgcagtctttcataggtcattatcagaacgggtctcttgtcaatagcatgtctgattgggagcagctctctgagtcatttagcttttcttgtcaggggaagctttttaactgcttcctgctgtcctgtcattttgtgctaaccccaaatggctttgttaaattgatgtcacctttccaatttcttcctagaagcattttcctttctggttaacaatggaagcatttatgcaataatcaggggagaagagtagccaaacatgaatgctgtgaaaacccatacgtggaatgaatgcatttatctatctgtagatgttcattggagagcaggtccccatcattctggttgacacaaagaggaaatatgaaactcattcagatagctaaagaaaaaaaaaaagaaataaaagtaacccctaaccaagaaaaatccccattgccttcagtcaaaaagaggatattctacgtcagactattgtggaattatcaccaaacaaaaaattgaaggaaatgttggtgattgttgaaatgggtgaggggtacattgtttcattttacaatctatgtttctttatctttgaaaattttcataagaaaaaatattttaaattgtgatagggattgaatcaaagaattcacacatggcctgcagttcctgggcagagacaatgtttcccctaaatttaatttgcaatgctaacaggacccactccaataatttatagctgaaaatatgtttgaaagtaaacctggcttgttacagatacttctgtgaacaaaggggtctctgatcaaccaagctctagcatcttataacatagactaatgtttttacaaacactggactcctgaattttaaaacttaaataatacatcccattaaatgcagagattgagatttatgcatagctgcttacttgaggactcctacttcataaaatccctaattaaatagaaaagcattctcaatctttgttaatcatatctgggagaggtctggaagtttagagcatgattttattagagcattctcacagttcccttggtggcaacataatccaatttttgcaaattttaatggccagtgcagcatgggtttccatggattggaactgaggctcagatatcctggcttctggaggtagccacactgtcccacctcagacccttcacctaactatgcccaactctaacagttagagaatcaagaacaattgaacaaatgtctccctacatatgtcaaaatattaaaagttataaattaagctaacaaactgctaaataaaatatattctagcatactaatcaagctgaaaaactgctaaataaaatatattctagtattctaccttgacaaatatgactttgtagcaacctggaagccaggttcaagtttcgaattctcagtccctccaagttctgcaccaaggaatatggtgattgatgagaggtggttcctgagtcctgggcccctgctcatagcatactccctttctcttaccgcctctgactttatctcatagcacagggggtctccctacttacatatggtctccccagatcatacattcaactcactccctcccaatccaacaccaaaaaactgaccttagcaactaggggtgcacacaatggctgcatggcctgtctttttgaggaagggagctcaagaccacgaggacagagaatgccaggttctgtttaactgcataatggagaggttgaagcataagttctaggtaggcatgtccccttgactaattttgcgaggggctcaggtgatccatggaaaataactttgttgcttcctcttttatcacactccctaaatgttggagtgtccctgagggcttggtattgagccctgtaatctttcctctagtactttctctctaagtgatgtcatctggttccatggttttatatccctcattcattcattcattcaacaaatatacatctttctaggtactagggtgtgacagttaatcttatgtgtcaacttgactgggctcagggatgtccagatagctggtaaagcattgtctctgggtgtgcctgtgagggtgtttccagaagacattagcatttgaatcagtagattgagtgaagatctgctctcaccaatatggataggcatcatccaatctattgagggcctgaatagaacacaaaggcagaggaatgatgaattctccttcactcttctcgatctggtacctctgacttctcttgccatcagacattggagttcctggttatcaggcctttggactctgggcctaaaaccagtggctctcctggttctcagacattcagattcagacagaattataccaccagtgttctggctttccagcttgcaaacagctggcatggaacttctcacctccacaatcatgtgagccaatgcccataagaaatctctttttaaattatttttattttttaagagatgaagtctcactctgtctcccaagctggagtggagtggcaccgtcatagctcactgtagcctcaaactcctggactcaagtctttctccccactcagtctcccaagtagctggcatgtaccatgacacccagctattttttaatttttttttttttctagaggcactgtcttgctatattgcccaagctgatcttgaactcctgaactcatgggatcctcctgcctcagcttcccaaagtgctgaaattactagcaggtgtgagctactctaccgtactataaatctccatttatatatttctctatatatcctcttggttctatttctctagagatctgtgactaatacatgggatacagaagtccctgtgtcacagagcttaatttctagtgagggagatgatgagtaagatgcggtagctttaagcatgatcctaaattctttgctactccatcctgtacaaggtagagtcaatgtctactcccttgaacttaggtggctcacagttcccagtggaagtgacgctgtgtgacttttaaggctaggtcatcaaaggccatgaccttggtcactgggaacacttgctcttggagggctacatagtcctataagagatgggctaccctagtacttcacattggcatcctggtcaacatttccagctgagtcaggccttcagcccagggaagaggcacgggaggggggaagccatcttggaagtggatcctccaggttcagctgttccagcctcagccattcaagttattcccagctgaagccctagacatcagggaacatggagggtctgtactcaccataccctgtccaatatgaatccctcaaatctgggagcagaataaaatgattactgttcatgccactaagttttggggcaggatatataatgacttctaaatgtatgtcttccaccagtacctgagttccaggcatgtatgtttagctgccttctcacagctccgtttggatctctaagttgacaattaaaaatatccatttctaaaatgaaagtcttgattaatacaactcctcccaaacaaaaaccaagcaaataaaaacaacttgttcatcttcccaatcttagtaaaaaatacaactcccagcctaactgcttaagatagaatcatcctggattctttttccatcacttcccatatcttgtccattggcaaatcctgctgttttgacattgaaaacatatctttaatctgtccatttctccatagctccactgccctcatgtgagccctcactgcagttgtctcttacctgaaacagcctcctaacacatttcgtggtactcaaacctagcccactctagcagccaggaagatctttcaaaagcaggaatgaagatttccaggtcagtgtggtgtggtgagtgaaagcttcatcactttccactcctctttaacaaatagtaacaaaggttatatattaaaagtgacaaattgaaaagacaaagttgggattaaatatagaataaacatgtccaggaaaaaggaacggaatcacacacacgtgcgcgcacacacagtgaggaagctggaagctccagccttgctatcttcaggtctcaatgcaaacagcaggtcctggaaaggtccatgctccatgagatatttctttggaggagccaactgcttgaagccataggctgagagtgggttctcaaactcataaaaggagaaaggaagaaccacccatccaactacagctgcctcttactatagctcctggcaattgcagatatggggagttgaatagcacagacatagccttgagacaaagagctgagccaagccacccccagctctgcaccaccatctgagatgtagttctggattgttctgcagaaacacaggcagctggaggtatgcacaaaaggaaggaggtgtgtgttggaggagactctcccatttaaaataagtctttaaacaaaacgtcccataaacatgaaataattgaacactaaaaaggacaataaaataaaaaatcagcatgtaaatatgctcttagaagagctgtatatgagttagttattgctatgtaacaaatcacccccaaactaagttgtctttaaatagttgcttttatgaaagattataatgaagatgttcagtattattaatatctgtttatcaaataggtaaatttacttgcaccagaaagagaataagaatttatgaacacaaagttcagacatagaaagacacatctgatagacttgaaagatggggcagtggaaggtagattgcagaaaatgtcatggggtcaagagagggaaaatcatgataaataaggaaggttattggtcataatcagtagctgggctggaagaggacagcagaagtcttagatttagtctcagagctccaactggtggagttctcctgtaccgtagtaaagagagagaggtagactaaaatagggaaatacgtttcactcaggaaccaagcagctttctctacacacaagaatgtatacaggcacacaggcatacatgcatgtgaagagaaagagagctcctttcagcctgagaggtgggcaccagagctcaaggaggggcctgtggttctgaaagcatgacccagtataagcctcttcaacacaagggtacctagggcatctggggatgggagttcagatggcggtggcagcaacatcagtgacgtcagagagaataagtgaccaggataggtttgtgtagatatagttgtatgaaccaatgagggaagagaggcaactgtaataaagcagaagttagaaagaactgagtgtgagacaaggtaagaccaacccctgccaaccctggtgcctgctagagagatacaggacaggcgtgagctgaatcctgccatttggctgtggtagccaatgagtccgtggactttagaacaaactgttgaagtagcatcctctgggagctgcatgctggtaaggcctaagagatattcaggtaatgcaagagtgttatcaagaaggaaacatacagctcttggagcactatccttgaaagtctaaatttacaaaatcatcaagcagcccctacgatggcctccagtaattttcatgttctggtattcaaaccagtatgatttcctgcacactgaatggactgacctatgaaaccaataaaatattgcacaaatagtggtgtgtgactttagtgactaggtcataaaagacattatagcttctgagttgctttgttggataacttgctctatggggagccagtggtcatgttgtgaagccactcgatgcacaagccatcctatagagagatccaagtggtatggaatggaggcctctgctaacagccagcaaggacctgaggtctcctaatgtcagtcctgaaagcaagctctcctggaagtagatactcagccccaggcagccttcagctgactgcagcttcagccaacatcttgacttcgacttcctgagagaccccaaagcagaaccaccctgctaagatccacccagatttctgaatgtttgttattttctaagcccttacattttagggcaatttattatgcagcaagaaataactattacagattttgataccagaaatgaggtcagaaaaaaggccctttaaagattttaaggatttgccttctcacagattctatggatgcacccattctagggcgggatgatttcattctgctccatgtggctacaacaagctagcctgagcttgcaaacatcatggtgacaggaacccaggaaagaaggagaaaacaaacaagcacttttcaagcctcttcttttgtcaaatttgcttctgcctcattggccaaagggaatcgcatggtcaagcagagttgcctggtagcgtgatacttaagtgcatggatataggcagatttggtcaactggggccataaatactatgaatgtaccaacagcgtactaagatctccttaaataaatgtgaaattataggaaaatgttaagataccaaaacctttattcacgtgttcctgtttttcacagctgtttaatataatccagttttccttagtttttatggatgagtccttaaatttatacatagtatttgatgttaaatcttgtccaatctgtctggtcagttttgatgggaaaattccttggagttgccttcttttatcagttaccagaggcttcccctaagctttgatatgctgtctagtaataaaacctgactacttacaaatactatttttaaaatgctattaaattgtttcaggactgcagatcacttctcccagcacgcacattctgtagtgctttttcttccaagatcagaagggagattcaaaaaaggaaatgcaatgcatgagatgtttgctgcaagaagcatctcttccccattggaaggtaatgctgtttcctttctcttaatggtagctatttgccctttgaagtccagcttctattactattttgtattggatgattcttcttcttcttcttttttttttttttttttttttgacggagtctcactgtattgccaggctgaagtgcagtggcatgatctcagctcacagcaacctctgactccctagttcaagcaattctcctgcctcagcctcctgagtaactgggattataggcacgtgccatcacgcccagctaatttttgtacttttagtagagatggggtttcaccatgttggctaggatggtctcgatctcctgaccttgtgatcctcccgcctcagcctcccaaagtgctggaattacagacgtgagccaccacacccagcctggatgattcttttacactatttatacctgttaggttagcacacttctaatgcacatactttctttttctgtttctttttcttttttttctaggatgttttcaatcctgtcccagttgctttaaagaaaattggaacataaatgttaaaaaacatattgaaacaacactcgatggtgtttccaagcagagttaccaagtggtttcattacattgatatgtattgcaagaggaatcccttgttacagagagcatccagaaaaaaaaaaatatgtgtgagttatgggccttaaatgcctacgctggatcctcatgggaaaacatgccctacttagtacaggcggctctcttttttgaaggctttctgagcttagaaagcgtgggatttggcctcaatattttttatatggaatgtgagaaaccgttagtacttaaaacattgatgtcggtagatttgaccttgtggtttcaagaattttcaagcaacctgaaatttcagggtagtcggtagtttgtacttttgttgagacaggatatttaatctgaatgtgctgtgaagctggctttgggtaggagtcacttaatccagtgtggctactctgtcattctcatattattccatcatccttcacctaggaactcttatgaagtgatagtagtggacaggccatttgtccacagtgattgcaccatccccagttttctcccatcctcttaataattcttgatattcattcaagtttctccttccacttccccattacagctcaagtgggcattgattggactaggtccaagcatttggtttagaagtgagccagtgacttaaaaataatgcaatcaaagcagccttaaaggacctatgtattggttagatattgctgtgtaacaaaccactccaaaactcagttgctttaaacaataaacatttgttacaactcatgactctgtaagtcagctgtgtggttcttctgatctcagttgggcttacctagatatctgtggtcagctgcggatcagaaagtagctctgttctcccaggctgggccctcgtgtgttttgaggttggctgtctacaggttggcctgggttaggcccagctgaggtggcttatctctgctccgtgtagtctctcattccacatcagggtagctaaggcttgtgcttatggtgaaggaaaaactctaagacagagcggaaatgtgcaattctcttgaggcctaagctccgaactagtatgttgtcatttccaacatattctattggccaaagcaagtcgtgagggcatcccagattcaagaggtggaaaaatagaccctgcttcatggtgagaggaaccacaagttcacatggcaaaggacatggtttcagggaggggtggaatgttggagccatttttgcaattagtttatcagagtcagagtgaaatgcatagaccaggactaactctgtctcacttttggatatgaacaaggaagtggatggaattcctcagaactgctgactgccttcttgataccaagagggaagacagcctgaaaacaaggcaaatgtacagggaaggacagaacaaaataatcacagaagaaaaatgtcacaaccctcatgacatctggatcaagccctggactttgcagatgcttaatctagtaaattctggtattacttatgcctgtgtgtttggagttttctccttggaacatagagacatctaaataatattgcaactcaaaagactacaaattggatgtggtgtatattgctcaggtgatgggtgcacaaaaatctcaagttaccattaaagaacttacttatgtaaccagacaccacctgttcccaaaaaacctatggaaataaaacaaaaaaaaaaaaaaaaaaaaaaaaagaagaagaaaaacacataccataaaattttaaacaatagaaaacagaaataaataatactgcaattcaacaaaacaatagctttgcttcccccttaaaatggctcctcccccaagaaatttggctgctggaatgtcaatgaaagtgaagagaatgaaagatatgtaggaggcagttctttttaagaaagtcaaagtttcacataaattacagagtgaaataccttattcaacagaagttcatatctgtgactttagtcctatacttatggaatattcaagagtctgaaagcgtcacttacaattttcagttataatttactgtctgttatgggaaaaattacatgtttcagtagacagttcctcaaacttttctttttttaacttatatcttctaaactgctatctcagtttgttttctccctattcccaccagttaaggtttttgctgacctctgtgttctaagacttttattacaagtactactggtgtgttgaatacactttcttaaactgtacagttcacagttcttcaagattccaagaaaactctctggggggcatggagcttacaccctccccatccagtttggtaattatagcttcagtagtatttgaaaatgtgtaggttcacaaaggactttgggatacatgttttctaagcattgaggttcaacactgttcatgattcatttatatatatatatgtatatatatatatacacacacacacacacacatatattttgtttgttttgagacagagttttgctctcgttccccaggctggagtgcagtggcgtgatctcggctcactgcaacctccaccccctgggttcaagcaattctgcttcagcctcccgagcagctgggattacaggcgcctgccactacgcccaggtaattttttgtatttttagtagagatggggtttcgccatgttgggcaggctgctctcaaactcctgacctcaggtgatcacccgccttggcctcccaaagtgctgggattacaggcgtgagccactgcgcccggcccatgattcatttatttaaataataaatggatttctaaaactttagagtacaattggagcatcaacagcagcaataaaaccaaatggtacaacgctgaaggtaaagggtgacaatttctttttgctgtgttaggaaccaaaccaggatggaaacactgaaagaggatgagagatcatacacaatttcaggtccatcctaattctcaggaaggcaagttgaccgtcccaaattttgcatcaggtttgccattaggtctagtctggagaaagttgtcaatgtttcaaagacaaagggctgataccaacaggtgtctgagaatttccacactagctctataacttacatgtttctacctaagcagggccaccatgtgtagctgtgtggtttgtgcaccacatgaagcctgggagcactgttcgtatagactatcatgtgaatggctcctcctggcctcacgcaggtgcaatatacttacttatttgtggtagccatataatcaaatccctatgtcatttattaatgggattgacataagtcctatccaatatcagaagctgtgtatctactttctgtggttgctcaggtcttttggcctcagcttttcacaattaagaaaaaaagtgaacctagagtatcattactccttagatgccccagacctaaagacccagtccctgtggtctttttcatcaaagctctcctggaggaggatgacattagagggttggaaagtgggcgacggggcagtacccatctcaaatcaaccaatcagctttctctcatgagctatcatcagccaaaaacatgccttcttctccctcctgagaacagtgtttcttcctgcatcccggcagaggctgtttgcttaaatatacatcaagccctttctactgtggatgaatctgctccattaatatctgtcactgttaatggagttgctttgcgctactcctttctcactctgtccactcttgaggaaatttacattgtcctcttagataataataaccatggtaaatgctataatttattgagcatttacttagtgccctgtgttgtccattgtccaatttctttctgacagggagggagtgctttccctcctccccctttttaaaaatgaggaaagtgaacttgaaggcattaagtcagttaggttggaactggcacaggattcaggctatgccctctccaaagcctttgctctcagtcatgtgcctggggatttcatgactctgtgttggattcaggcagaggagagccaggactggatgaagcggtgtgggcactgaggtaagctcataacatcttaccttcaacatggtattccgtaaacattgtgtcagtattgaagcctgttgtaaggagaaatggcagaggggaaggcgactggtgaaggtgctcagtctctccttggttgtcttcagttattcactctatccctagccagcctcccattcaacacagccacagccctacagctaacaggtcctaccaccttaaaacacaggttagtggcagaggtagctcgattgcattaaatgcttacattgattctgcacttggctatgcgatctgctttggccaattggacagtaagcagatggaatgcaaagagggactgtaaaaagcacttgtacatttttacttcctctctttaatctttgctactattgtgagaacaagcccaggctaccctgctgaaggcctccaagaaacatgtggagcagagataagtcatccagctaaggccatcctagctgaccagttagcccacagctggacacatgagcaagctcagccgagttcagccaagctaagcccagaccagcaaaactgtccatccaatctctaaactcatgaaaaataataagcagctattaagccataacgttatcaagtttgttacatagcattatataactgacatagtgaccatggcttgttagtggacggcagccatcgaagtactctttcccaagtggcccttagatgcatggtgaggccagcacagatgctttatgagaacaagctgcagtagcatgcaccatagaatcttcagattttcccaaggacaccacgcagcctatgcctttactgagagtcctccttgcaaaggccagaagagcatttgcttgtctggaccccttctattggttgatactcactggccacctgacatacaattaagcttgtgccttggagaaacccaaaggtcagcatcttcactgaagcactcacttttgctcacagccttgcctccacaaatacaccttcacctatggacaaaacctccacaagggtgaaagcctgtgaagctggcactttagacttcatgctgcctgcctgcatcatagtagctaagggcccaagtgcaaagtgataaagccaagtcccatgaccaacacagacatctgcaacttgctctgttcacaagaatgtgccatggcccatgttgcagacacatcccaagcttttctgtttgttattatgatccatcagtgacacttcctttatgttccttgaggttcctggactagttctctggttgctacagtttttcaggatggagccaataaagaatatctctcatttcatctcaagttctgaaacaactgagaagtaagattaaacactgcagacagagatggattttctaaaataaagctgatattggaggacatggcttatatctgtgggaaagtgggtttctggatactgagcctcagactgagatttaatctcagacacggtcggatggactgagttagccctccttaccacaaagggttgagcaaatgcttgcttcttgtaagcagctcgattccgagaaagacagagaagaaggggctgggctaggcaatgccggttcttgccccaaaaatgttccacttaccttggcgagaaaggcccagagggtcacactgatggtctcccctctccttgagagagacatcacaaaaaggatgcttccttccccattgaggaattctggtaaataaagttgtggcattgatttttaaaacaattttatttctagaaatgtctttggtgcatcttttaaattggagcattgagaagctgccaggctggcctttctcctaatgtaactttgaggagacctgacctttgcacaagtctgacagaaccctagttattttgtttcctcttccggatataaaggtacacaagaattatcacttcagaggagatgcagttgaaaccttttttacaagcacagtgagcctttgctctcctatcatgaatattctagaattatggaatagcctatccaggcttagagcctgagtaaacatgagcttgataatcccagattgtccctctgtggttggttggctggcattgtctccaaactgggggccgtgtgcaaatgagccttaagctcactaaaggcttggcttcccaccccagacggttttatctgaggacctttggatatgatattctgtgtttgaaaattatttcctctatattgttatatggatggctttcttgtcacttacatcttaggtcaaaattgaccttttgcaagtaaccttctctaacttcctggtcacataagcctgtgtggtagttttaaaccatgatagagtccaagtccttacatcttgaatctgggctaaccttgaagactgttgacaccaacgaaacgcagcagaaatgacactgtgtaactcccataacttatgatgtccagccattaatggcatagagcccctgcattgcttgctgggactcttgcttttggacctctgaaccagcatgtatgaaaacaggctaccctgaggccgccatgcttggaggaagcccaaactacatagcaaggtcacatggagatgttccagtcagcactctccatgtatgtccatgtgcatcaccaccagatgagtatgcagggccttatgatggattattccagcccccaggggtcaagcactccagccttagaatcttcgcagctgagactctggatattgtgatagagacaatctattctcaatctgccttgtccaaatcttgacccgacacaatctgtgagcataataaactggttatttggtgccatttacttctggggtgatttgttgtgattcaatagtgatcagaactcctcatttattttttatattaaatagtactacttatcactgtcaaaatactgcattatttatttgttcatttatttatttatagcctgtctttcctacttatatgtgggttagctctgctcttgcatgagcttgtctgccttagacctacaacactcttggcatatagtagacagtcaataagtatttgttgaatgaataaatagacaaatgccttttcccttgtagaacagaaataagagtttttgggagagtatttcagtccttttattctttatctctaggctcttggcaacaaaattgaggctatttgtatgaaatataaagtagactgttcctttataatattcaggtgaactatcctgtcaaacattcagttattcattcaatacgtatgtgctcagcaccaaacccacaccacaagacaggcactgtagttctcactagggacattgcaataggtagaacttagactgtcttcaaggagtccattgtctaggaagatcatgggcaaattaaaggatagagaaacatctttggcagcctcagagtcaagctccttacacggcatgagcaatgactcctatctgcatgttacagttttccccagggccctgctcggtgcctagcacttaacaggtggtcaaacaagtatttgttgacactccaatgaataaaacagaaatttttttctgagccggtcaaaaagcaaaggtgcatataaaagagaagtttgggtaactatgcaaaatggagccttatatatctgagtaacatttggttcttggtcagcgtattcttcaatcatagagtcattatagaaaccaatgtaaaatatcaaggacccagcactaacatgccactgcctttttaaagaaagcccattaaaatgacataaaaaaatggcatctgcctcaggtttctgcttggagatgaattcatgtgatctcagcattttatcctggaggttcccctgagaagatgcactggggaagcaatttgtatctcttttaactaaaacagggagcctggaagtccatgggttgtccacttctgccaaactctaatccaatcatggtgaaaggcctcagatctgaagattttgtgtactgttaactgcatgcgattttttttcccttggtatttacatctaaggctatgccaagcctctgattttacagccaagttaggattctgagaatatttctgagtagattgtgcccaaaatttaattaagatacgagaaaatttgagcatatcatcagaaaaagaggaggtgttgaattattattcagtgaatgaatgaggataattaacaaaactgatttatactttctacggttttatacattttcaatgcagtctcatccagctccccatattctgggaggaagggaggacaggctttacaaagatgcttctgtagagagagaaagtgaattttaggaaagcaacacatggaagagtcgcctatgtgcagcaagaatgtagcagtttctgattgattgagtccttatgcttggtgctttttgccacatcacactttggtggctaatatggacctttctgaccccaaaagcttcatcgtcagagaagtaaaggatggggctcaaccagaacacagacagaaggcgatgaggctgtagacagtgttacctggggtaagtgtgactgtgatatcaaaatagctagtggtgtctaaacatccatagcttttaagcattactcttttatgccatttaatcctcaataacttgtccaacagtttttatgcacgtgtcttaccccccttctaggaagcagtattatgtactgggaaaacacaggtatttaagtaaaacaatttctagtttctcaagcttcgtgagccttaaattctttattaataagttagggatgatcatgcctatattgtaaaattcatgtgatgatcaaatgttttaccttatgtaaagtaacttatgcatagtctgccacataataaggcaaacaaacatcagtagcctgcccttatttttaagccggtgtctgagatccttgaaggcaaaaagctggcacagtgccttgcatgagagaggatttcatgaatatttattgaatgagtgaatgcatgaataaccataggatgcaatagcgtattaatcagggtaactctagcaacagaaacgaatatatttccatggcttgtcaaaatagaatgttattgcttactcacctaagagtccaatttgggtgttcccgtcagcagaaggctgttgattgcatgtggattcatgaccccagattctgtccagcctccatagcttgggccttggagtctttgtagatcagcctcagttgcttcttaacccaagacctgtaaaagaagggacactcatcgcttccactcatggtctgtgggagatacctggtcatttggtcatacctggatgcaaggacagctgggaggtgagatccctcattaggaagctgccttcctacttcacactctagtagagtgacccaattgttactgccaaaatagttaaaagagaaagagctagaaacttgagatgagtgaacacaagccaataatctaagtagaagatacttccataacatgccttgacaagagacattctttaatacttgacccactcagatacctggaggaaacaagcaactaagataacggatcaaatgtaagacaatggggatgagaggaagctacggctggttggtgagtgcctaactctcccttttatcttaggctttggagtagagagttgaattcataacgcccttcagtttgtatcatgtcatggtcacaagtccaaactgaacaagagcctcattttgcctcattttattttaactttttttttttttttttgagatggagtcttgctctgtctcccaggctggagtgcaatggcacgatctcggctcactgctatctccacctcccgggtcaagcagttcccctgcctcagcctctggagtagctgggattacaggttcccgcctgtaaatagtcgcctgtatttacaggcgggaacctgtaattccacgcctggttactttttgtatttttagtagagatggggtttcaccatctgggccaggctggtcttaaacttctgaccttatgatccacccgcctcgacctcccaaagtgctgggattacaggcatgagccaccatgccaggcctttattttaacttttaattaaaatataatatacctacaggaaagggtaaaatctcaagtgtacagttcaatgaagtttttacaaactaaacccactcggtgcaaccagcacccagataacagcatcccacaaggtcttcttatgttcccttctagtcaaatctagtattacaaactatgctagaagtctgaaatggaaagtaatttttctttctaattttgaatgtattctggtagccacctatgagacatttgcaggctagaaatgtctcccttacagagatgagacatttcatatgtagaaatgtctatagaaatgtagatggttcgtatatttcttatacaaaaataggactcttgttcagtctgggcctatggcaatgaaatgacatgggccgattgcaaagagtatagacagaaatcgggaaagaataggaccattttgcaattagcacgtcctggagtgagtacctcaagctacctgaaaaacagcagtcacttaggaacatcaggcaggaaaaggaaaccacacaacactcatctaataacatttccatccccgagtatttatcagccatgtgggcctactatggctacgctgggttggaaagaaagcaaaggaacaagaagagcctgtggtctcttccttgaacaacttgcatctaagcacagcttcaaaaccaagacagatgaagctaggagagaattcgtatgtttgcagtgatgcctctgctcataacttctgggtggagagaactgggggagccttagggaaaaagggaaaagaatagggcttttataagtaaggagaaataccataatcagtgaggtggagggaggaatggaaagcagggagccatcaggacctccaagttctgtcagccatagacatagttaggcagtgggtggcgtacggcctggtgtctggaagcatttgaaggaaagatatgtcgctttataaaggaagaggtgagactgtgtttgctaatagctccaaagctccaaaagatgcccacgtccttatccctggaacagatgaatgttaccttaaatggcaaaaggaactttacagacatgaataaattaaggatcttgagatggggcagattactcctaagatggggagattatttgggtggactcagtgtaatcacaagcatctttataagagggaagtaggagttagagtaggagctatgataatggaagcagaggtcagagtgatgtggccaggagccaaggaatgtgggcagcctcagcctggtcctgagctggagaagacaaggaatgggttctttaccaaagcctttggctttaggttcatttcagactgcagacccccagaactgtaatgtcatatatttaccctgctttcagctgctgttggttggtcatttgttacagcagcaacaggaaatgaatacaatatgcttttgccatcttggaaaccctgcctttcattacatccctgacatggcagtagatgttcttgcctggccagaaatattattgccctgctttgggccctgcacagaaacagtccctctctggccccctccagctgtgttcctccacaaggagctgagggtctttgaggccagtgctactccaatctgatatgcatgatagctgcagcagcgtcacctaatggtttgttagatatgccatgagctcccttccaacctaatgaatctcaatctctagagtaaggcccagaaatgtgggttgtaatcagccctccaagagatttccaagtaggcctaaggttgagaacctctgctctcctgggtctgtaggaatctgtttttagggtttgtctttctaagggtgagacacattggcgtgtgtgcagcccagggcccaggagttggaaatttgaagagaaccgggggaggatcaagctcagttacatcagctggggtatctgtactgatgcagaggaggtcctagccacgctggaaggagctggcagtgggaagagaaaagaggatggatcagatttttcacttaatttctttcccccccggagagcctagtaataacaatgtactgaaataggggaaagcgagtgtgctttgaaaagtgctgagttttgcacatttggagaaattatcatcttctttaggagcccaaatcactttttaaaatacgactgcagtaataataattgttatgataataaaatcatgatagttactacagttttaggtttggttccccagaagcagagcctgacataaagattcctgttccagtggcttatggagcaactgttctcaggaggacctggaagtggggaagcaggagagaaaggaagaagaaattatgcaactaagcaattatagacgtggccccagcctcagcctggtcctgaggggagctctggagtgtatgtaacacttcatagtttgtctgtatgaatgtaagggcactgggcttcctgactcctgcccccatcagcaaccacctgcttgggataacacctggcacttgggctccctgtctgtctgtgcggataaagtggctcagggggcccaagggcagcctctgaagaaggtttcaggtgcaagctgttggcagcaaaacacacgggagccaggggatgcatgtgcacaaccgttaccttaggtccccaaggacctgcacggggcactgacatgtccactatgactgtcctgagctcttttcggtgacaggcacttttctccaggcttccttgtattcagtcaccaaacccttactggtaagaacagttgccatcctcactttgcgaatgtgaaacctgaaacatagaaagatgaagtaattagactaggaatccactggaggtaggaggtagccaggctgggactcaaactgaggcacagcagttcctcgatcactgccttcaatggccccctcctgcctctgctgtcccacgaactcctgtaccctccctgccccaagcttctggcaggggcagtgcttttccaaggagtagcatgaaggcagttctccaagttccctttatccaggaaaccagagcaaggcttgtgaagaaaatggaatttttcattaaccaagaacgaaaatctcaatctatgcacttaattaggtcagatacccattttcctctgagtcttagttctttgaagtcagaggaagccctgagcattggagacgggaaaagaaaaaatggaaagagaattgggaggaaagctcctacatatacacacactcacgaaaaaaaaaaacaaaaccaatccatcaatccttgttaagggttgaatgcagataaagttagctatcaaccttatcaacactgaaaaaaaaagcttaaaataaaaactagggcaatcccctgaaggaagaaagccttggcatcagtctggagacttcacctaccttgttaagagctgcattccctactctcttatgaaaatactgaacatgtttgcagtcaattccatgactccttggtgatttagatattttagttaaagcagaagactaaaaatatagatttgaaattttcaaaggcaatgtgaggggtagcctccgaagagccagatgccgttggggaggcagcgttggagcggtggtccagaggtctgggctctaatttcagctctgacaccggcctgcatggtggctccagaacggcactgtccagcacacctgcgagagatggtgggaatgttctgtgactgtgtttcctggacactggccactagccctgtgtgactagtaaacactcgaaatacatctagtgtgactgaggaactgaattttcacttttatttaatttcaatttattgagtttgcatttacatagacacatgtggctgcaggctaccatgttggacagcttggcgccaggccttaaccctccatcgacttgatttttaaaactgtacctgaaaaatgagacagatatgtgtctcatccctttgttgtacagatgaaaaaccaagtatgtcagttaaatttggctatataacacaccaccccaagactgtggcttgaaataataatcctttatttagcttatgatactgtgagttacaaatttaggatgagtataactggacagcttttattgtcttcctgggttaactttgcacatttgtgggcagcttctgctcagctgggaaatggctggtttaggatggtctcagctgggtggctcatctctgctgcatatggcctgtcatcttctcagaggctggcctaaactttccatgtggtgactgggagggtgccaagtaaggaaaccttagtgtgcaaagcctctgaggccaagtcctaaactggcatactgtcacatctgctgcattctattggccaaagcaaatcagaagaccagcccagaagaaggggccaggaaacagacccacatcttgataggagacacagcagagtcacatgcaaagtgtgttgatataaagaggtgtgcaccactgtggctatttttgagatcaaccgtattgaggttcaacaggtaaagtgaggtcacaaaggaaacttttagtagctctgaggctctgacctgggattcttggctctcagaccagtgctggcccttagtctatttcttggattctctgtataacccttgcctttgtgggccttcgatttttatatctacagagagaaatagagaaatgcaatgattttgctctttttccagctctcaattggtttaagtgttggactggcggtttcctttaggtggggtcctggggaggggatacatggtactgggcagacctggatgaacccacttggaattcctgaaagctgcattttttttccccaaatagctgtttgaaagccagaaatgaaggtatactcaaccaaacataaggtgtttaccattgagcttagccttttggaaggaagttcctaaaagactgagtttggaaaggacagagttttcctttcaggtccttctaatttataatctacccacttccttttcctttcgtaaatatgatgtacgtgagtggagtgatctaaatatcttcctagctccagaagcctgacagtattttcacgttgatctcccgttcgataaatcaagcctcgcggatgtgtgaactgcgacgccaacgcagtagctctggaggagcggggctgcggctgccgcgcttcccgtttcgcaggccgtgagtctccgcgacggcattccacgctgacggaaatgccttggagcagctacctcacaactgtcagtccaaacgtgtgtgttttgccaaatcgctggttcacaaatctttacttgtgaaaataaacagaaatgagtacaaggaagaagattcagaagaaagagaccatggagaagatagtgatacttataaagatgatgatgaggatgatgagctggtgagagagggagaggagggggaagagagagaagacgggagggaaaggaggagaaggggagggttagaggaaagagaggggaaggagggtggaggaggaggggaggaaaagaggactaagtggaggaaggagaggagggagaggagaaagggaggtagaagggcaagtgcaggaagagagagggagagtagaagagaaagaagaaaaggaagagaaggagaggtgggtggagaaagaggatcagcaaaggctggagctggtaccaaagcccaggaaactatacagatctcacaaacaagctgctctctgctcagtctgaaaacacgtgggttagaccatctttctgcaagccgaccctgagacaagggtgcgggagccaatgatctattaaggaggcgctcccaggagggagtgaggaaggcaagacaggggaggggaagaggctgagcaaaggtgcagtttcaggcaagttcccagcctcagcctcaacctgtgggaggttctggagcatccattacaccttagaatttatctccatcaaagtaagagagctgggtttttctattcttggctacatgtcaccgggggatatcactctcagcaacttctggttctccatgatggtgaggatttcaggactcatcaccccttagcagcaaagcactgctgaacagggacatagacacaggaaccagcaaaagggaccctgggggtctgggcagggtgcccacagtgtttgccataccatctttatgagtttctccaaaagctgaggtctatgtaggcagctgtggtccacagaaagggagcccatcctagactagagagacaggagccgcagccacacgtcaggcccagcacagagctgcagaaccacagatgaggcccacagaattgttagcttaatggttgttgtcttaagccattaaatgttggcatattttgtctgcagcaacagccatctgatatggagggaaggaaattacctgatccctgagtctaatttccaacccaaaaatatatttgggtagaatctgaatatggggtcagtcctggaattagaattgacctccatccaatttttattttactccatcttacagtggcaaagaacttcacgaggcactagacagttctgcctggaaggaggcaataagaataatgtctctccagttattactgaattaatattagacaaatgacctcttctttcaagtcatcctcagtattttaagtgactactaggttttaatctactgcctcatagtccttgaggtcactgctacaatagaatttgttcttgaaagataactcagcttctttgaaaagaagggagcaaataatattaagaaggaaagaataaaataagattgcatggctaagcaaaaagtgaggggaaataaaagaagaaagaaggaaaaattaattgaactgtgctttgaatgattggcttggtgggcatttccttatactactaagattacagcagggaggttaggtcaatatctcctttctgtacatgtatatatctcagacatttcctatgactttaattaaagttatttttaagctttggagaaacccaaatacaaaagcttatttcaacatgatctttctggggactttgcaggttgcatgttaaagatgcatcctattctggcttgagtgaggtacctatcactctccttgacatcatttctccccagaatcactgtatttacatacaaaaattaatgtaaaaagtgtggtgagccactaggcagatggaagcctttgactaattagttgagaatggtgacaactttgaagacatgctttcgaacagctttagcgttgacaatgctctgcaaatatggggacacagtgttactttctcaggagttgggaggggaggaggtaccaggcttgagtctggtatcttggctttggaggaggaacaactgaggctgtgcaaggtcacttgggcagctcaggtgacagtgctgcctgcagagctctcaggagcctttccaggttttttggcctcttccgtttcttctttctggatctgtggatgggagactttttccctgtcagtccagaccctgtctcagatgccctatgccttacacagctggtcctttttgcttctggaccatctacatagatgtaagaatcacctgaagagcttgtcaaacccagacacctgggtcaccctcccagccattcaggtcctgcatgtctagccagctcccaggtgatgttgatgttgatgttggtatcttgagggaccacacttggtgtatctctgctctaaagagcgatacattgatgtaagcacagggttgcaaactggcctcctgcaggccaattccagccctagaatctatttctttccttgtaatattttaaaggaaaattacccacaaaaatctaaatgttttgtcttcttttgcaaaatgaaaacgtctgtcattgtcaatggtgacaattgcctttaagtctcagcattcttattttgaagggacatacactcttcagtttgctacagtccccatcatcccctcttgcattacaccaggccacattcattgttgtcttaatgcgtcaggtctctattggcccctaagtttgtgtcctctaacttaagtttgcataatactaattaattagtattaactttcagggctttctggagataaggccttaattaagaagtgtcgtactgataggggaagtctcagaatgcagtggctagcttctgcagagaattgtggggcttctccagtgaccccacagaagagttacctgccacgtctccatgagattaacccagtttcccaaaagttgacatataatacagtcatgtactatataaccatgtttctgtcagcaatggaccacatatgtgatggcatttccttaagattaaaaagattataatatcctgtttttactgcacttttcccatgtttagataggtttagacacacaaataccattgtgttacaattgcctgcaatattcaataagtcacatgctgcacaggcttgtaacctaggagaaagacaccatatagtaacctaggagcaacccaccatatagcctgggtgagtagtaggctctaccatttaggttggtgaaaatacactctgtgatgttcacacaatgatgaaatcacctaatgatgcatttctcagagcatatccccgtgtgacacatgattgtaatgtagaaatagaagagaaaacactattcacacccttttgggaagaaagagcctttataagctcttttcttaaactacaatgtgtctgggctaatagaaacttaagtcaggttaaaagatgcaaaaagtttaccagggttctatttatgaagaactccattttcttcttccattcctcctccctcaattcccctaaaagatgccatatgtagttgactgggagccctggctgggttcgaattctgacctggaagtttactttctgcattactttggttaaattattgaacttatgagtgcattgacttccccatgcataaatcacactgacctcccaggattatatgtgatgattaaatgagataagtcatgtagaggttgtagaacagcctgttgcctagtgatgtcagtcattgtcattaccgtctgcttcctgtcataataagtgcattggtggagggatccagccaatctaagctccaattcctaacctagcaggtgttgagcatgtgaccttgaacgatgctacctcttcttttatttataccttcaacagatatttgttgagcctctatttcctcatttgtaaaatttggatagtagtatctgcttcatagagttgtaaaggttaaatgaaataatctatgtaaagtatagtgcctgacatttgagaagtgcttaataattggttgttccatagaaattgctatttttttcagtcaaaaatggctgatattgacagctttctatagttcaaactatataagcagtactattattgcttttaatagggtttgttgttgttgttgttgttgctgctgttttattcctacaaactctgtaggggacatatcagttagctcttgctatgaaacaaactacccccaaactcagaaggataaaacaataagcccttattatttctcgtgagtgtatatataagctcagtggttcttttgttctaggccagacctgatggtcttgagcaggtttgcttagtagtctgcaaccaggtaagatgactgtgggctttctagtcctgaatggccttgctcacttgtctggggcaatggagtatctggaccacgtgtttcgccctctagcagggtagcctgggcttattcatgaggtggtggcaaaattatttcaagaagagtgaaatcttttgggcccaggcatggtactggcattgtgttgtgtctgctgtatcctattggccaaagtaagccacatggtcaagcccagattcaagggctgagaaagtagactctatcctttgacaggaggagctgaaaagtcacattgccaaaggcaaggacacaggcaagggaggaaaattgaggccttttttattttcaacccatctaaggcaggagatgtaaataatacttgtgttctttgcctcaccatttatattatttctttaatttaaaaatgatttttgaaaagcagtaacaatttctctatatcttaattattaggtaattttgatctttctaccttttttggttctcctggaattttaggaggcttctggctgggacttacatgaagaggctaatttagtgccacaaatgactccatctctctgccttcaagtaaaagaagcagaatcacctctgcaagaaaacaaaataattctgcatcaccttggttggtttaacacaggtctcttgcttatgaaatgcacacttacctttgacattcttttttaccgagtacttctaatcatcagtgaagttttttaaaaagacactgctaaatgtattcatatcataagtaggaaaaaatctgacctaatttttaagatctacagttactggaggctttgtgaggactttaaagggctttatggattgaaattatgaaagccaaaattactgtatcactctgtacatgcattttcctgttttctcctcccaacaagattctaatgaaagtattaatactagtcctatattacaggtttgagaaaattgaggcacagaggagttagaaacttgtccaagtcacatagcaagaagcaggagagtcaaaatttgagcccagaaactctacattgcaggctatatacttaaccattatgccatcatgcaataaagtaaatgattgtcctgtctctaaccaaatgatattaagtccttttctattccgtggaagatccagaagccattactaggaccatggaggtagattgcagctcagtatacaaacaaatatgtatcctaactttttagagttgtctaacaacaaaaggtggtgtgaggtaggggttcccagatatgattgaacatcactgattcaagaacttaggcctcagagactgggttcaaattcttactcaatggcagtgtctaaggcacctaagttatttttggcctcagtttcatcttaagaaataaacaagcaaaaagtaggaacaactctaggtaattacgtgttattgtgaggacagagtgacatatttaaagctcttaactcattataggtcaccagcaaggattcatttcctttcttcatctgccttaggagttgtccaatagaacttccaagtgattttacaggaacttgagtggtaagaagaggtatttttgtatcaggaaaaggatgggttgagctacatggtactaaaaacatcacctggtgagcttgttagatacacaaattcatggcactacttctgacctactgaatccaatcatctctgggtggggccagaaatctagtctcaaggtgattcttatgcttcttaaactttgcaatgcacttgcctggatgacctccaaggactcttactgctttaattctgtggttctgatttatccatccctcgccaccacccatctaataattgctcctgtttgctgaatacctcctttgctcagacatgtgagtaaattctttgcatgcatttgtttaatctctacaccaatggagtggcattatgatcatccacactatacagatgaggaaactaaaaagttaaggaacctgcagactaggattccaatgtgaatctgtctggagcttcatagctacaaagcactctgccaaacgaatccctccagagggtccatctctcagaattccaagaaggactcaaaggggagctatttgtcttttaaattctcttacttgatagtgcaaggaatgaagaaattaatctaatgatcccagacaagtcatagaaggcttgtgtggaaggtcattggctgataacctgaatcctctcaagattaaacagtgctgggaggatatggggctgaggagaagagggccaggcactctctcccagggaactgctcagcgaggagccacctggtgggtggaagtgctgccttaagtgccctgcagttgagacatccagctgtagataattattttttcccaactataaataaaatgatccttaagaagaataaaaaggagaaaagcagttgggaagcctcatgtatactctccccatccactgcattggatgataaagcaatgagttaattttaaccatttcctgccacctgacaccttttctgctggtaatgtgtctgtaaggaactggtctcgaagcaaaatttatggtcagctaagcccggagaagaggtgactatgtgcactttcctgctctgtggtcctgacaaggaaaacccacagcacaaatctacagtttattttgtgcggggagaaagaccttgtgtcccctcaccctggaacccctacctccgctttgcatgtgcttcagccacacagatgtatgcttccagcactggcctcctgcctgggcactgctcaatgtaagtggggcctcgagatatagacaatgatcaggatttcagatgatttgagaaggaagtcccctgggcccaactcaaaccacctccagcaccagaatttcacaagctgacatcagtcctttggtgaagcattcttcctcttataaaatgaaaaatatgcctggaatgaaaacacaccaaccctcctctctcatttgaaccattataatcaaaaaagttatttttttatgactcgattttgatgggtttggggacagagactacagaagccatggatatgtgctgttcaatgtgtggtttccatcagcagcgctgcacctcctggagcctggaagaaatgcagagtctcaggtgccgtctcccacctcctgaatcagaatctgcattttaaaacatccccaggtgattgtgtgcatattaaactttgggaggtactgatctagatgtctgagactgaaatggcaccacatagtagtcatgtggggcaaggaaagaggcccagagatcgtttagcctggtgggcaaacacataatctagaaatgcagacaaaatcctcaaaatgcatgcagagcagaaagcagctgagagatcaagatgtaatctctaaccatgggtcaacatttaggtcaatagcaatatctcttggtggcctcttagggacggagccctggactctcagtgagtaataacaaacaaaggtaagaataacaaacagaggtaagaatggtattgcctggttgacatctgctaggcaaccttccacagcaaaattccagttaaaaatttcaaatgtgactgtctgacaaattgtcagacatcatattttctacccgaaacctattttggttttcagttcccactgaatgttgtccatgaggtactgagccaaatggtgggcttcccagacccttatcttgatgcctgagagtctgagagtctccaggtatttgagtctaaaggtgaagaaggatcattgtcctggacactgtagatgggggaggtccaggagggtagagcctgggctgaagactggggacactgtgttatgtttcctctggttaattcagccaagcctgccacaaacctgtaggagaaactattgatagttggctttgggaggccaagatgggaggatcacttgagcccaggagtctgacacttgcctggaaaacatagtaggaccccagtctctaccaaaacaattaaaaaattattcagacatagtggtatgtgactgtagccccagctactggggaggctgaaggaggaggatcacttaagcccgggaggtcaaggctgcagtgagccatgactgctccactgcactccagccttggtaacagagtgagactgtctcaaaaaaataaaaatgaaaaaagaagaagaaacttgtctgtgtgggccatgttgcctgtgttgcctgttattgtgaattggagagaaaagtttaaattgtcacatatttgtttctaaaacattattataaataagtagttcagcaatttcagtaaaacctcatagactttacactcttcagctgaggatggatttaggttcctcagtcccagctccaccatcagctactttgtagctacgatctgaagcatgcatgggtgggagctgaagtctgcaggaatccatagcgcatcttctgtgaagggaggcaactttgtaattcagatcacactcaggatgatgtggggttccaggttaggaaatattctcttccatgaaatggaacacatgtatacgataatttaacatcaatggaaatgtcgaatcctaatgagatacacagagactgctctggtacctatggaaccgcattgcaaatctccacaatgttatctacatagaatataaatctcttcaccaccaggccctgatgcgtctcatccagtttaaaattcttgaagatgattttatcattccccaacagtgaggaagaactggagaccctggttggggagggagcaatttatagaaatgaaaatagataattaagctttaaactaaataaaatagataagaactagttactgagagaattcaaatgaggcaattatgtgctgcagaatctcagcaggtctagattttcagggagaggcaagctttcttgtttataagcaagtctcttattacacaaggtttaattggggatgctaatacctgtatctcttcgcagtcatgatgtctcatccacagtaaaccccaagcatctatcggcaacatcagcatttggtggtctgtagaaaggtctctattcaaaagcatggacctttttatcctaacgtcttttctgtatgttcctaaggaattaaatccatctcaatcttcacattccatcagtgtctcatttactcagggactgttctagagacagggcagatcctgaactcctagggcttacattccactggaggaaacaaccaaaatacatgtaataaatctacactgaaggtatgagagggaaaaggacactaagacatagtataactaaggtaggtaggtgactgcctgttacacatgacagtcagaaagagggaggtccagacagagagaacagcaagagcaaaaggccgaggcagggatgaactcggtatgtgtatttttctttttaactaatgtttatagcacttatcaaacactggaaactgacctaaataatttgcaaggactagctcctttaatcctcataaaaactctgagttaaatactattattatttgtaaaatgcagtattttataagaaagttgaggcacagagagtttaagtagcctgcccaaggtcacacagctggcaagtcatacagccaggattcaaacccaagtctgaccccaaggtctgcgctcgtaactgttttgccagtggttcccaaacactgctgcacgttggaaccccctggaaatcttcaaaaaaacaacaaaacaatgatgacaacaacaaaaaaacaaacaaaaacaaaattgatgcctggctcccttgcctcgccattcagatataattggcgtgaagcaagagttgggcactggggttttgaaagctcctaggaggttgggatatgggacagatttggggaccaagggcatcgtgccatgtcccacttagcatttgagtgtttgagggcctcaaacaacaccagcctgtctaggcttggtgaataagggagagagaggcattccctcccttcttgtttcagttggttcacttttttctatttttacacttgccaaaatcaaaaacatccacataaagcaggtgagctcctttgaatcaagagggctgtggttgcaacagagatatcattcacatcagcagtatgttgtcagggcctcagtgtgcctggctcttacccatgcctggtgcactcccaccttgctgcttgacctcaggagaacacccacaaaggccaccagaggccagccttgctgggacagtggcagggacagagctagtccctgtcctgaggggcgtcagcccttccctttcgagtgggctccttttgtattttctgcagaagtcattgctgagtgaaagtggaccttgtttttcttcaccctaccaattggctgacttgtattcatgctacatattgctctgccattcaccagaaagttcggcgaaaacacctagtggtcaactacaggccatggggaaaagtctgggctgtgtctgctctgggatcacagtgagcatggacacttagggagatgccagggaatttatttagcctgtaggtactacagaactaggtaggggtaagattgcattgtcgatttcaagttttggctcagacatatccctactatctccccaaggttgggaactagggctattttcctggggccaaggttctccttggtaaaactgaggcaggttaggtggccactacggggctgtggctcaagatttcattggtgtaggggggaagttggtttgagcatctgcaataggccttccagagtctattgactctagaatggggaaatgttaactgctcggaagactgaggaaatgtcctttccctgttgattaaaaaagagcacaaggaagttgggagaatttcccaacaccatctttggtgagttgtttaactggaattggaagtgtttttgccaggcgtggctggttacactcctcacccctattcaagtggaaggaagccttctaaagactcctaaatgggcagtgaagcaatgaaagaggtaattaaagcccagatgtcaaggataggcttggtattacttacagtgctacagcataatattttatgtgattaaaatgtttcatagggtagcaaagtctgtgttgtaaaatgccccatcaaagtcccagctggtgaaccagggattatgaaacaaagttgcaggttgcaaggccagtgccatccacattctccattcatgttgtgcacaattagcatccatgagtaatggctcagagctgactaccagtgtaaagttttatggggctttctacagaaagacagaaaagtcaaatgcacgtcaaagacacctgattaaattctattcctttaatatttctaaaactatgaaatattaggactaagagttgtatttgctcctaatttcaaactatttggagatttcatgaaaagtcatatgctaaggtaaaattttaaaacactggtgatatgtgataagtattagctaagttaattctcagcctgtggattgtggagaggtgatggtggtgagggggccatgggaggattcttttcaggatctattacagggagtctgaatctgtatgtacaatcatctcttgaacaacatggatatgaactctgcaagtccacttatatgtggattcttttacctctgccacccttgagacagacagcaaggttaacccctcctctcttccctccttctcaacctgttcaccatgaagacagtgagggtgaagacctgtatgaagatccatttccacataatgaatagtaaatatatttatcctccttattattttcttaataaccttttctctggctcacttcattgtagtagtacagtgtataatatatatatatatatattatatataaaacatatacaatatgtgttaatcgactgttcatgttatcagtaaggcttctggtcaacagtaggctgttagtagttaagtttgcgagagtcaaaatttatatgtggatgacaactgccgtggctcatgcctgtcatctcagcactttgggaggccgaggtgggtggattgcttgagcccaggagtttgagaccagcctgggcaacatagagaaaccttgcctgtacaagaaataagcaaaattagccaggcatgatggtgcatacctgtagtcacaggtatgtgggaggctgaggcaggagaatcacttgagcccaggaggtcgaggctgcagtgagccaagattgtgccatgacactccagcctgggtgacagagagagacctgtctcacaaaacaaacaaacaaacgaaaaccaaaacaaagctatatatggattttcgactgtgtagggtgtcagcattcctatcctccacactgttcaagagtcaactgtatatcacacattgtatatagactctctctctgtctctcatttatatacatatagtaggtgctaatcagttgaataaaaactttacagatttcacaccagcctttttgccatattctattttcttaatcagcaaacattagaattttaataataaatatcctgccccttttccttgaaataaaaaggaatgaaatccttgtattaatgatgtggcagtaagtaatgaaaccaagctcagatggtgtgagagaatgaacacctgtgctctcttcctcctggttgggagaattctaggtctgtcactagatctggactgaatcaggccattgggcagagcaacaggcctgagggggccaggttctgctgtgcttacccacactggagaaagaggaaagccagtgtctcaagaggttggcagaacagatccggggatggaaaagagtgggaatgaagggtctggaagtacaatggctctggtttgttggagagttaggagagtttaagagagaagaaggagaggacattggggtagcttctatagatgtgaaatattaaagaaatataaatatcaggaaatatgattttaaactgtctttaaatttaaagtggacaaatagaatcccctctcaaaagacttcaggaaagattcaactggcattttaggtgtttagctgatggatcattatttctttgaaaataacactatacaggaatgaactttcggggagaagccatggaaggcatcattgtatacagattacaatggctctgcaatttccatgccctttctccctttcttccccactgacaccccatgcatctggaaagaacagctgctgcagctagagagactgagcatgagcccgatgaggtcagaatctctgataggcaaatggatttggaccttgtcattcttaatgcatgaaagttaataccctggtggaaatcactggtaatttgctggcaatagctgagttatggttttaggtagcacatcagcaaaagaggtcatgagagggagaaaattggaatattaaaaatactgtcattttagagggaaggggacttttttctagaacttggagggaacagcttgccattacagatggccaggtccattactaaggggtgccgaggggcaagaattacacaaggtaacacaatactaatttggagctctggaaacccaggactcacctcccaatcataagcactatgccatgcttatcttcctgccaaatgtgagtgcagtcatgcaacaccaaattcatactggtggccatggtcaaggggaagacacaaggtcaggagggaaacctctaacactgcttcatcatagagaaggctgagtttatacaaaaccagaggaaatcatgtgaagtggaaaccccaaggacccaggagctttggttaaatttcctctcaaagcaaagcatcttgtaattttcattcttagcactccttacaattacaattagacattgagtaattatttatttattgtctttctctttagactgtaagttccatgtgagcaaggatactcagggtattgtcttgtgtgtggatatatccctagtgcccagcacagcatctagctcatgataggtgctcaacgattattggttcagtgagggaataaaattagtgtcattgaaggtggaacaggaaatgaacactcaagtctaggggatggatggtaaaggaatatgatctagaagaaagaggtaagacgaaactctgtacaaatacagatttaggcaaagcaagtaagttcctcccattgagggtaagactgggtcctctacaacatgggtgcataaattacagtccatggaccaggaatattagcatcacctgggagttttatgggcttgaaggatcttggccccatttgctaaaatagaatctgcatttaaacagatgtctaggtgatttatgggcacattacagtctgagaagcactgctctactgcacaagcaaataccttgcttctaaggaagaagaggaggaagaaggaggaaggaggaagaggccactgctgaggacgctcagaacaacagtggccaaggatggaggaaagtgtgggaatctgtcctactgaacccttcacacaataggtgtgatattcaatcttagaccgggaagtctactattagtacaaggaagaaggtgaaacaatgtcatggaacctcatcatggccattcctgaagctggtatgtgtgatgtgactgagaatcagcaagtcaagccaagttctagtgctatgaatcttattgactcccacagggaaacatcacatcatccacatagagaaatggaaagcctaaagtgtagaactgtttacttccagtttattcataccagttggctaaatttgagagacatgagaaaaaataagtacaaatgagcgagccttgggaggtaaagagttggttataccgatggtaaaggtcagtgatgttcaaactctgtcttctgaaattctggtgttctcaagcgatccctcagtaggtgacatggaggtggaggaggtgagaggaagacagagcaggaggccagatgcagccaaagtctctgttttgaaggtgtgggttctgccagttactggaatgaagaaaaagaacatgaattagtttgtatgacatttcagtgagattaagaaaagatggtttgatgagtgggaacagttttaacctaaacaattacaaaagatcatgaggtatgttcagattctccctttttgaaatgagtgaaacacagagcctgaagatgtttacttttgcaggtacctgctatttaacacccaccatgcagcacccatggcttcatcacatctggatttcagttctctttccagctgagcccaggtgtaacctcagagtatgtcttaacatgtaactctaggcaatcattagcaattaattggaaatggctttggaaatgaaattcatttaacaatttcaggttccaggagatagaaagacatgtcaatattttctccaactacttacattttggtagtgtaacaatgatcttgtatgaggacaagacatgagcatttgtgaattttcctagctactcagcactgtttgaaacaccttttctatgactgggatattttctaccttaaaaataacacttccctaagaatggagcccgcaactcatttcttcccatcctccttgcagatggacctatgcaagacttctgattgaaagacagcagcataatgaagctggtgcttcacagaatccatatttgaataaagggaatggtgaaggaatctagctttctaagtcattaatggtggaaattctggcacctggctaccaacttcagtggtatgagctgaagtatctttatccaactgcagcagaaattaggtcctggctgaagcagaggtatcagaggtgctttctgaattgttgttgcctttatagcctctagacctgatgctctaattctcctagagatttttaaatactctttactgtttcttttgtgattaaactagctggagtagatcctgttgtttgcgactaagaattctgactctgtagtttaaaaaaaaaatctctaattcttcatccttccttacatgtgttatcgattgctgcctaatatattatcccatgcctcagtggcttacaacaataataaaactacattatgtctcacagattctgtgggttaggaatattcaggagtggcttagcttaggcttgcagtggctatgtgggcaggggtggcaatcatctgaaggtttgacttgggctggaggattcatttccagcatggctggcaagttggagctgattgctagtatttgacttcagtttctctccatgtagacttctctacaggtctgctcgactgttctcatgacaagcggctgctgggctttctgcagagcaagaagtccatggtgagagaaacaggcagtctatttccagcctgggcagtccaacaccatcacgtctaccaccttttattcattagaagtgagtcactggctgggcatggtggctcacgcctgtaatctctgcactttgtgaagctgagctgggtggatcatgaggtcaagagatcgagaccatcctggccaacatggtgaaaccctgtctctggtaacaaaaacaaaaacaaaaacaaaaaaagacaaaaattagctgggcatggtggtgcatgcctgtcgtctcagctacttgggaggctgaggcagtagaatcgcttgaacctgggaggcggaggttgcagtgagccgagattgtgccactgcactccggcctggtgatagagtgagaatctgtctctaaaaaaaaaaaaaaagatgtgagtcttaagtccagcccaccttcaagaggaggagaatagcactaccttttgaatatggcagtgtcaaagaatttgtggacacattttaagaccaccaaccatgccatttgccatgtaactttgcagtatcttcctacaatagatgagctaaactgccctgcttcataactctggactcagtcatctgacttgatttggccagagggatcttagaagacatgatgcaaggagagatttgaaaagtgcttcatgtcttcatttgttcccttgcatctctgctatcaccacagaatgtatccagggcagccaattaaaggatgagagttgtgtggtacagagtctgatatattggttatctatgaccacataacaatttatctccaaacttagcagcctaaaacaataaatacttgtctttcaggatttctgtggttcaggaactcagcagcagtttagctggtcagttctggctcaggggttgcagtcatctgaaggcttgactgaggctggaggacccatttccaaaacattcatgtgaatgtcaaattggtgctggatgtggaagccttggtttcttgccatgtgaatttctccatagggctgattatgtgtcttcataagatagcatctggcttccatgagactaaatgatccaagagaacatggtagaggctacaacgtcttttgtgactaatccttaaaatgactctgttgtttttggaatatcgtattagttacacaggacagctccattttatgtgggaggggactacataggggcatgaatattaggagggaaaagtcactgaggaccatcttggaggatcacaactacacagagttgcctgagtcattccagttgaggccagcttagatcagccagtatctagcctaatgccagacattagccctaggagcttagcagagctagctgcccaggcaaccccagctggctccagatgtgtaaacaataagcgaggttttgtggttgtttgtttagcagcattcttatacgcagctatgaaaatgtgctgatacagcacattagcgacactggaagaaattttacaggactatgaattagaattataagaatccctagccttggttttccgattagctaatgctaagattcgtaaataaataggatctctacttttagggatttatattctaatcatttatatacatttaagcatttgggccactcatttgtttctcttgcaaaataaagctcaggaataaatgcatgcatttgcttttattctgagttgttcacaaactgctttggtgtatgaagactggaattatttttcctagactttttgagatttaaaaaatcacttttattaatcctagtttacatataatacaattcactaattttaagtatacagtctggtgagttttaatgaatgcatatagtcctgtagtcattaccataatcaaaatatagcacatggccatcaacccccaaagtttgtttgtatcacatgcaccttaaagcaaacttattattgaagtaaaacatatgtgcaaaaaaaagcataagccataggtgtgtagcttgatgaattttcaccaagtgtatccattatcccaatcaagaaatagaacatatagaaactccaggggttctcacatgtcccctttcccaagtggtaaccactaacttaagtcaccataggctggttgcctgattgtgaactttaatataaatagaatcatattataagtattcaattgtgtcttttgttaaataatatgcttgtgagattatttcatattgttgcatgtagttgtataatagtttattctcattgctgtctagtatcccactgtctgaatatataacaatttatttattcattttactcctgagaaacatttgggttgtttccagtggggggctattatgaatagacccgctatgaacatcctggtacatgtttgtttgcattttttggtgactttccttttgttaggggatagtagaaatagaataaaaagttgctcattcatttttgatccaatttgctattttgggcacttgccagaaaagaacagaaatttcagaggcgattttactgatagaagattaggtctcaggtttatatttgctctattttatgaaaaaaataaaaataaaaatgaagactgtattttgaaatttgtgaggcaggttaccaagatggtcaaatagtattcacattctagtctcttgagtaccaacccttcttccctccctcccgcctttttccttttccctctctatcttccttccaatcatttgtagatggatataaattttaaaaactgagttggataatcctcaggtgggttttttttttcatgaaaatgaagataaagtcaaatggttttcaatttgctctaaatgttttattttcctgggaaatagctttcagtttttgtaaacacagacatttttgttgtctcaaatttcattctgtttattacatcctgccagatgggtctccataagccataaagaaggccagggcagccatcgtaacccacatcctctccattcctgagactgctagccctgccattacaggcaacctaccatttcatctgccattgatggtgggcaagtttcaatttgggctggacagaccacaaaatgatctacaaatggcaggttgcaggctattattttgtagactataggctagtttgaaagtcctgttccatctagggaagctcacctgttcaaaattgaaattactactgtacaaggactagtggaggacaatccttatgctctacatgccacacgtgtattcaggaaaaaaaactacacattctagttgcttctagttcttttcttggacaaactaccagttaatctattttagaaaggtcattctacctgtggactttaaggtagacatgagagttcagctccccgatgttcactcccctttgacctttctcaagagcccttcatgtccgagtcaggtgggaccccacccccagcatcacagttgaccccaactggttaagccaactgcactttagcctctgtgatctggtcatcattggccacatgttgtaagccaggcccatctgaccagtgcattcacttttgtcgctttggtttgtgttattggaatagcaaaatgtctgcattttgcaggatttgaaaatgcaatcacctagcttggggctccttgcagtcttcttctctgcaaggccacacagcccgttgtgtaaggaaacaatatcaaggaagcagcatttgtcatacttaggctctagcctttccccattcttctgaggtaagcttggggcaaaagcttttttctccctctcagtagggtccatatcagtaaatgcacacccattttcaacaactgaattgagaaactgtgagtagccagagaagccgactacttcatttagggtgactttcaatacatttgcaaaagagcctataaatagcctaagggtgaggtttctgtttcttcttctcaaggcagatcggattctgtgaagtacacagtgcttggtgttacaatctcattctttttgaggtagaaaacccactcaataggaatcatttgcatttctatttgagcagcctggagacaaatatagtgaaatgaatagccttttaatttaattggcttcccagtgtgaatccaaaaatagaaggcacaatccatcccggagttactgtagaaatcactgagggccaaagcccagcacataacaccccccaccgccccagagtctaagcatctttctccctaatgccagacttcccatggaaaccagggtgtggtggagctgggggatccagtccctaatggacacactattgtctatttactggtgattagttttggttagcgtctcttctcttcttcagatataaactatgctggatagtaataagaagaaagtcgtattacatattcatgtacttttcaaaatcaaaatagagccaatgaagagaagaaagcaaatacattttgagtttttaaaaggaaaatacaggagggtatcatagtgtggctaaaagtaaaagcccagttaaaaggctgcctgaaagttctgacatctctattttctgtctctgagagctgaaattctgttagagtcctggggtaaacctggcctttgcgttggaagtgaagaaaggagaaggtagatgctgctggggctgcaggctaatgtttcctattctttctacagttgaaagacatctaagcagaataccagcctctagtggtcacttctagaggaggatttgggggagaagaagaccaggtgtagacatggttccttatgttgctggggagggttggagaaggtaatggggacaacatcagccttctgtggagaccaggtgttttcctcaaatgatcttttcttcttcacggactaaaagagccatttatgtctggcttctctgaagcttctgtttttgtccttaaaggaaaacaaattccttaggttgaataatatgtacttctgtagaattttgggagaattcaaatgttgaggggaacatatgacagaaacaccataagacattgtattttaaaaataagataataacttgccttgtttggctaaaccagaaggttccagagaggagaataaccagtgtcctcttcatcactgaaagctgcccacttgattcaatcccgtacttccagtagcaaaggaagcatagctcaggtgaccctcaccgacctccccgggagcaggagcaattctttccatagaaggactgttttttgttttgttttgttttgttgttgttgttgttttgagacagggtctcactcttgttgcccaagctgtagtgcagtggtgggatctcggctcactgcagcctaatctcagcctcctgggctcaattgaccctctcacctcagcctttcaagtagctggaactacaggcacgtaacacaatgcccagctaatttttgtatttttagtagagatggcattttgctatgttgcccaggctggtcttgaactcctggactcaagagatccacccacttcagcctcccaaagtgctaagattacaggcatgagccactgcacgcaaccaaggattgtcttttaaccaggttctgtgtgtgtgtgtgcgtatgtgtttaattatttctgcaagaccatggacctctacaaaactgtataggaggctctagtgaattttgggctactcatgtacccctgccctctccaactctcttgagtgtttctcctctcttcttgcctttcatgtggttcccagccatcctcaactaaccctctacctgtgttgggaacttgagtggatcacctcattttcttccttctttccttccctccctctttcctttcctttccttccctccctctttcctttcctttccttccctccctctttcctttccctccctcctcctttcctttcctttcctatcctttccctccatcctcctttccctcccctcccctcctctcccttccccttcccttcccttcctttcctttccttttttctttttctttcagactgagtctccctttgtcgcccaggctggagtgcagttgtgcaatctcagctcactgcaacctccgcctcctgggtttcaaatgattctcctgcctcactctcccaagtagctgggattatagctatgtgccacgacaccaggctaatttttgtattttaagtagagacagggtttcaccatgttggccaggctgatctcgaactccttacctcaagtgatccacctgcctcagcctcccaaaatgctaggatttcaggcgtaagccaccactcctggccccttagttacttttcagaacaacctgaagaggaaggtcaaattgtttgttccatttcacaaatgaagaaagtgagccctagagaagtgtcccaagttcccctagtattcacattctagtcaggcatttctgaagctctgagcaacccctacatccctaagaaatatatctccatttgggaaatactagttgctaggagaggttgaggatgtggtagttctttagggtaaatcgctgttaggaccacctgacgtgtgaagtctgattctacactggccatctcacctgggggagggaggcacctgcttagatgggataagtggaaccaaccaagtagggatggattccctggctttgcaaacaatgacaactttctttattttggccaacacttgtcatcctcctatggtgtcaagtatggcactactcactaataacactaaaagagacagtgttacttagagagcagaaccggcagtaaagagaaacatgctttgctgctggctctgtcactagctgtcttgtaacacagggcaggccccgctttgggcttcagtttttcatctgtggcatgagggcttttcattaggtaattgctaaggtcactattttagttaaactgcttgcaaaaaggaattaaatcttcatttaatgtatgcacagtacaaactggaaacctttgagtacaaaggtttccagtcaacttgtgtgtgtgtatgtgtgtgtatgtgtgtgtatatgtgtgtgcgtgtgtgtgtgtgtatgtgtgtgtgtgtgtgtacattcttgcctttatctctctcacctttgggatcatttctgacttccttcttggtctgttaataattaatagcactgacatttataagccagtggtaatatgtttcgattttatcatttcttttcatgaattatggatatcattaaaaagagatattttagaagtccggaaagggaatggaagttgctggggggtcagaggagggtagagggcacacaaccttgctctgccatcatctgtcaggtttcataaattactttcagcttgaaagaatttgaaacggctggtggctcctgtccgttcttcacatctccttcgtgggtgggaagacagccacagctggaacacagatttataactagagctgtgaacccctccacctatgaagaagtagatcaccaccgaaagtgggtctcccttagatgccattcaagactgtaaatcccagaactgctcaattgacaaactcaaatttcccgcagacctggaatcataaaacggaagttctcatgctgacattgtctctggccaactgtggctttgaacaaggcgatgaacctgtgggcttccttatttctaaaatattaaaacaatgccagactcatcttgttaataagactgttttgagagtaaaattaaattgtgagtcttaaaaacaaacaaaacatacattctttgaaagacaccattaaggaaaaacggcaaaaaaaggcaagccacaaactgggggaaaatatttcccaaacataacaaacaaagcatttgtatctagaatatatatatatataaacctcttatatctcaataataagagaaaacatctgatttaaaaatgggtaaaatatttgaatagacactttgtaaaagaatattatagtcaaaaatgtacaaataaaatggttttcatttctctatatgaattttatcttgtatatttgagattttttttgtttggttgttttttgtttttttgagacagggtctcccgctgtagcccagactggagtgcagtggcatgatctcggctcactgcaacttccccttctcgggtaccggttcaagcaattctcctgcctcagcttcctgagtagctgggattataggcacacaccaccatgcccagctaatttttgtatttttagtagagatggggtttcaccatattggccaggctggtcttgaactcctgaccttgtgatccgctcgcctcggcctcccaaagtgctgggattacaggtgtgagccaccacacccggcgatattactatgttttaaagtttacttatcttttcttctgttaatattactcagtataattattttattgcacacatttttctccattgtgtttttctcttctttcttttcttttctttctttctctccttctttctttcttttcttttctctttctttctttctttctttctttctttctttctttctttctttctttctttctttctttctttctttctttgtttccttccttctttctttctttctttttctttctttttttttttttgagacagggtcttgctctgttgcccgggctagagtgcagtggcacagtcatagctcactgctgtctcgaactccagggcttaagtgatcatcctgcctcagcctcccagaatagctcccagagtagctgagactacgggtgtgcaccaccacactcagctatttttttaaaaatatgttgtagagagagggtctttctatgctgcctaagctcctgggctcaagttgtcctttagccttggcctcccaaagtgctgatgttacagacatgagccaccacgcccagcctccactgtgttttttggtctctagaagttatatttgagtcttcttttaccttttatgtcgctttgcatgcttttctttaccttcttattcaagagttatattttaggtgttcatgaggtatatttatgatagttttttaaatgtccttgtatattaaggatattaatctgtgtcatttctttatttcttttttttgtttttgagacagagtcttgctctgttcttcaggctgaggtgcagtggcatgatcttgagtcactgcaacctccgcctcctggttcaagtgattctcctgcctcagcctcttgaatagctgggattataggcgcaagccaccatgccagctaaatttttgtatttttagtagaggtggactttcacaatgttggccaggctggtctcgacctcctgacctcaggtgatctgcctgccttggcctcccaaagtgctgggattgcaggcatgagccaccaggcccggcccatttctctatttctatagattgatttttttccttattatgggttctatttctatacttgtttgcatacctggtgatttttgactggatgtcagacacactgttggattattttggtcttcctttaaatatactggaatgttatacttagaaatagttgtgttctttcgaggcttgctttaagctttattaggcagtaccagaacctttattctagggctaatgtgattctactgctgaggcaatatccttctcagtactcaaacagatgccccatgtatcatgaagtttcttcattttgctattaaaatggaagctatttatgattctgaaggagctctgagaagtgttccatttacttctttccagtggttctttttctagctttgagtggtttcctcacatacataggctaatcagcactcagctagagatatagtgggaactgcctgcagaactctggaactctctgtgcctctttctcttctctcacattctaccttgcaaactctcactttcttggttttacctgcccctggctctgtgtgggttcccctccctgtactgaagtctgagaaccctctcctagcagtaagctgggacaatcataaggtttaccttctttcactccctcgagaatcactgttcagtgctgcctgttgtacaatgcgtgaaaaccattgttgcatatattttttctggtgtttttagttgtttatggtgaaagaaaaaaatctagttcttgttactctattatgatggctggaagcaaaagttccaaatgtgtgtatttcgctgcatgtaagttatacttcctcatgaactatcatgatgcactctcttccatgagactacatcataacctggacactcaggataattttgtaaaactccgcatgttgtggaggggctaaaaagtaacagaggagactggctagaaattgcagagcagtgtgtaactgagccccgtagctctgctataaatgcatcacccatatggttactgcaacccatgccatttcagagtcagctggctgtgcatcactttgcctggctatgctcagggcaggctggaagtgctgcagaatcaactcctttcagagcagtcttcaaccactgactggtgggaattgtagatgaacactccagcgacttcatcctcagggagataactctgcagagtgtcttctacattgtttccagacttgccaagaaaaatcaacctccagttgctcacagcggtgacttgtttgttaacacaccctttcttcactacccttcatgccctgtctcgtgtatttcctcctctccactccaccccacaattagtattttctgagattaccctctaaagtaagccacttatagatgaatacttgtctcagggtctgcttctgggggagccctaactatgacagtaaccgacagtgccttaatcaggctacccactggtcagccattccccactggggaaagaccagagtcccacaagcccagtctgttcccagttccctgcttatccttacctatgatctcacacatgaatgatgtagcatgtcttttgctggtggaagtatgaaatgataatccatttctggaggacaatttgggcagtaaatacagatttgaaaatgcttattatctttggctaagtgattgcatctctagaaatgtatttaaagaaaataaatgagggtctatacaaagtttggctctgagactttgcattgcagctatgaatgtcaacaatgggccatgagaaaatgatggcctacttttataatggaatactttgtggttattaaacataacgttgaagatgattgtattctggtagaggaaaatgcttaccatctattgttaggtgcagaaggcaggatataaagccataaatacagtacaatcttgtttggttttgtagctaaggaaaatttctgcttggaccttgcacatacactgaaagccctgactcctgcataacccaaagcttgcttgagcctttaactgctcatctcagacccagatgggaattatagtccagtttaatgcccatctagatgacatcatacagtgacaatgacccatctaaggatctcaggagagaaatttccatcttctacaattagtcacaaagtgcctgtcaaatcctctcttatttggaaggacttcctccctgccttctgtccagccctcacaccacccactggagaggcctactgaactccccaaagaaaggcatggctttccttgctttacatatgcattcagcctcaacagagaacatttttgggctttggttattctttgacatatttgaatgtagttgtttactagttttggtcaaacaaatattatacacaagacttctctgaataccttttgagtgccacacacctgtgcagtgtaaaacataataactttgagttactgaggatagaggattttcaagaagtaatttgaacctgaagtgaaaattctactcatgacctgccctcctttccttttcctctttgattttttttttttttcctgcctgtataaggtaccagttgagccacagggatgagagttgaagacatggctcattcatctttaaggaaggtattttaaaagtggcagggctttggctaagaattgagagatatacggatataaatagttcagagtttattctgggactggtgcatgacagatacatagagagttttcaagtcatctaatctaagtttgccaattaacagctgagggataaagcccagagattgaatgattttctgtaatctaacaagtaacaaatgaggacaattgagtatttgcattaagatcctcaactcttttctacttatttattcaagggagaaccttcctctcattgcacccccgtgtttatttaaaggaggcaatagtaggtttgtattaaagtaattcatgatcttggcggaatcatttttagaggagagattctcaaaccaggctattggctagaattacctgaagaacatctgaaaaatattgacccttgtgtttcatcctttgaaagttctgattcagcaaatgtgaggtgggtcccagagaaacatatttttaaattactctccaggtaattcctaagtgcagctacatactggacctgggtttgacaaagccttgggcaataggactgagagggaactggggaagatgggaagagaaaataggaaatttactctcaggactcagactacttatttcctctagagcaaattcattgccactctggttggtaaatactatcaaatgtataaatgaaatctgtaccttcacaggaatttcccagtttgggtggagatgaatttcaggactggcaagcagtcttctgcctcctctaatatgataatgaacattgagctattggctcaaatatacctctgtcagagattagcagtagatgtgactttgctgtttgtcttgttgtagaacagggctttcatatttccccattttatttaaaagcccgtttcctccttctctctacagtataagcacaaatcataatattttcttttcttttccaataataaatgtctgtaggggctgcaggcttcattgtttggtaagcctgacagatttctcctatcatttgtttgattaaaagactcagtaacttttaggagtcttgctgctggtttcttcccatgtgaatgaaatacaaaacaaaaggcttgacgtgccaaggagtaggcaggtgtgtttacatggattctatctatagcagctgtttactgttggagaatggatttcttcatgctgtgaacaacattatggaactttaagattgtgttagctcaaagtgctctttgactgtcttctctctttctaactttgctcatgttggtccttgagacagttgagccagtcttgttcctggcgttgtggtgagcctgaactagagatcccatgaatggatgagctggagaccttatctatgctgaagatattatggttactattagaagaaggaagctaccttcaaaaaaacaactatttaatacttctaatgagtctaggagttgaacagggctgttcggctgacgtcggctgagtccagctgatattgctgggatctctggtgggtttgttgtcagctgatggctctgctaaggaatgtctgatctaggtcagcctcagctggaacaattctgctgtcccccgccacatgtttcttataagcttctaatgggataaccaacgcacgtaatcagagaagcaagagagaaggcagaaaactcacatggctttcaagcttctgctagcatcaaatgtgctactctcgccttgagcaaaacaaatcacatggcagatgtcagtgtgggaggtaattaccaaagccatagggaggagtaaaaagttgggttatgaatatgaatgcaataaatctatcacaaagattgaactgataaatgatggtttatttgagggtaatggagggactattattctccttgtcattgctgaaaaatgtgataggttttcaaaaacaaagaatgggaatgcactcagacaatagtaagtataggggtgtgtgtgtgtgtgtgtgtgtgtgtgtgttggaggaggtgatgcttttcattcttttcttttttctcctcaaaccaagagcaaagagacttttgaagacctttgacaactcttctatcagtcctcttgggaactctaagaggatgattttaaggacactgtcaactgggagatctttttccaaacaaacactgctctcatttttgacatctggattttgacatcaagagctgcccacattctgagcttagaactcatctttgaaaagttggctactttttctgacacaagccaagaaaaggtatttattttaaaggtaagaatgagtaacaaaaacaaaaaacaaaaaataaaaccacccacacatggattggttatttttgcaaagtaaaaattgtgagttttttttacacacccatattcaagcgaagataggaaaaaatatgagccgatactaatttataaaccttttcttttgcatataagtgttgccactacagtcccatacataagcatcttagataaagcaataaaggctgaaatggtgaggctacatatcacttatttttatttctagaagataacttaaactacaatgggggaaaaaagcacattgttccaaggcattggttccaaacttttaacaatgataagaaataccaaagcatagaaacctcagtccatttttttggccactgcatttggtaaatgcttagtaacacaagagaataatgaggagaatgacacagctgagaaagctgaattcaccaaatgtcagagctgagaaaagctgaattcactgaggcctcaaatggagtcccaggacgggcagcagcatcatcactggggagccaaccttggctctagccagacttgtgataacagagtctgcattttatcaagatccccagggatgagtatgtacattagcatttaagaagcactgatgtataattggttatgttattaattagaggccacatctaggtttaatataatagaaacattgatgttaccaaactcctatttgtagatcgctatagcaacagccatctttggatctcactgtttatatctgtcaaatggggactcataactctcatgcatatttgtcaaaggagtggaggagatcaaggaatggctatcataaaatgctctaagacaaatgaagaggggtgtaaatattagggcttgttattttattagggaagtgcttagatcttaatgcctcagctagcacaagttctaaacactgaggaaactacgcactcaagaaatgctgttctattctcatgttattgtgaatgtccaacaattaaccctggataattggtgttttagtatactgtagcactgaccaagtatccacttatattgcaaaacgtacaacctacaacctgctccattctgtcagtgatgactcacccatcacttcgaagaagggtcttaacaccttgcacttgatttcctctaaggctttgttgctgaaaatgtggttctctgatgagcagtgtcagcctgggggcaggctggaaatgcaaaacctgcagacctaccttctatctgctgaaccagaacctgcctttgacatgatcctctagtgatttctgtgcaaatgaatgtttgagaaaccttgacctaaggaagtgcttcccaaccctggctgcacattagaatcaccctggggacttttaaaaatatcaataccaaactccccgtttctccccaccaccaattaaattagaattttgggagttgcctcaggcatctatagacttttaaggctcctaaatgatactctgatatactatttggtggtgtgaagtgagacctggagaagggccaggaagagtcaaatgacaagagtcttactactactgacatttgaaatgagttggagtatgaggggagtaagtaaaaagaatgatggaagagagagaaagttatgccaagtggaatctcaattgtggaaatggctgagtgacttacggaaaagctagacccaacattgaatgttaatttacgtgtagctctgtaatataaaaacatctgtcttgccagaactatagtaaagactgtaggtggatggtttgcttcctatgaaataagagataagggcggagaccattgcttgagtttatgtagaaaatggacaatgagttggatagtaatataggttgccagataaaatataggacaccttattcaatttgaatttcagataagcagtgaacacccttttagtgttaagtatgtgttacacaatatttgaaatatctgatatttaaatttaactagatgtccttgcattttgatctgctgaatgtggtgaccttatgataaaccctaagctggtttatgagaatcagaagctgagggctgcaggccatcataagaatgttagttttgagttggtagaaatcttggcaaagacatcccacttcaattgagctgaggcatcttgtttgcatttggtttgaatcggaacagctttttcattattctccatttttcaattttcttgggtctcccactttcccctcccccatttgccttggccttcccttgattttttaaagtgaacttttgcttgaccttgtgtttgctgtttttcagcatgttccagtcctagcaaaagaaaagttcttagtcttaaatttaaattcgttggtatttcagaaaaggctcttatttatttaccattttctagtataccacagcattagagatatggtcataaatttacatttctaaagtgctctcagccttctgaattttgtgatagacaatttcccggggcacaaaatggagttaacccaggatgtggtgagaaaaacatgggagtggagatgaaaaacaagagcaaaatgaaaacaagaatttcatctgaaatcagctcctatcaacaatgctgtctctccctatgcctgagacaaagggcctttatcagatggcacggtgaataggcagggccttctctcaaaactgccaagtctgtttatgtatctattatttcctttgaaaattgcctgaagtggagccttgtgaagaatttctcaagcattgcctcaaaccattgccaaggttgggttgtaatggaagtgcagaaagaacaaaggacaggcaccagaatgttcttttattgcttgcatgacaaagaggaaagaaaaagagaggaatgggatagaccagtggttctccaagtgtggtagctgaaccaggttcatccacgacactagggaacttaataggactgtagaatctgaggtcccaccccagacctactaaatcagcaactctgaggaccagggtccgtccagcttgtggtttaacaagccagccaggtgattccaatatcagctaaactctgcgatccacaggtacagacattttacctctttaatcttaatttaaaaaacctcatcttctctgcccgagcccaacgcttctgcccgggacatggaggacctagacgtgcaggactgggctgtcagcaccaggtaggagaagggttttgttttgttttgtttttttgcctagaagtatttttctttagtttgatgacaaaaggggaccaggatagtaaggacagaaggaatagcacagacagaaatgaaccttactctttctgtcagcttcacaaagtaaacagagtcatatagaaggaaaagttaccattaggtagtttaatggactagtctatctctaggacaacaatggctttaaacagaattttctgtttttatttattacacatttctacaataataatggctacaatttattgagaactaacgtctgacatgcactgcactaaacatgattcaaaattatgtcatttgatggacacactactcaataggtaccagggatctacccctacagtagggggtagaaggggtatgaaggcggtaaggcccttgcctaagagtttatagccacagaagcaggctctgaaccagctgctgctcttaagaagccaactcttgtttttttttttttttaggcggggtcttgctctgttgcacaggctggagtgcagtagcatgatcttggctcactgcaactctacctctgggttcacaccattctgcttcagcttcccgagtagctgggactacaggtgtctgccaccaagcccggctaattttttttttttttgtattttttagtagagacggggtttcaacgtgttagccaggatggtctcgatctcttgacctcgtgatccacctgcctcagcctcccaaagtgctgggattacaggcataagccaccgcacccggccaaggagccaactcttaacccatgcttctgggtctcggttgcatattgagcttgcccagggagcattaagaaatatcattacttgaatcctagctgcagagagcctggtatattaggcctggatgcagccaacgcttgtggtttttataagcttccctagcattccagtgcagagccagagctgagggccactgtcttactaagcctgtcagtttcctcttggtgcctttagctaagtggatctcaaccttggatgcaaattagaatcacctgtttcctctttgaaccataccagtgttcaggcccatttcctgagattcagatttaattgaccacaggtggcccaagcattgcattgttctgatgtgaagccagggcgggcgtcactggtctgacgctaactgctggagctgaggggatagaaagtatgttgggtttgtgatatggccctgactctgatgttacccctgctgataaagtcctcagcaggaatgagacagggtggtttcagaacagcaggtgtgagctgtttagttcaggattattggtaattgaagtaagtgttgtgtgtgagagtgtggacacccgtacatgtgttgtgaggacaaatacaaattaaaaataagaggcttagttcctcctgccgaaaataagggaagggatttcctttctctctctctttgtcaggatacttatcttggaaaacttgtaaatgtaagtacattatttattacttgacaaagtatattttagaaatgatctgagccactttttgaatgtctttctccaggtcctgggagccatctctttggaatgctaacaccaagggagataggaccctatctctttttcagtttatttttagttattaattttattttttttttaaattttatttctatggaagggtaagaggttaacttcagtgggcatttcacaccaagttgtaaaaccacctcttttcgaaaagacaggtatttgcatgattttttttcctctggataaagtcaattagctaacatagcttgtcaccccaattaccaagtaaagttaggatcagctatttgtggcaaatggtgctgtccaatcctcttgcttgagcactagttattgtttatctccagcacacgtatgtagtgggttgaatatgtttggctgcgtggaagggtgactgtgagttcttcctgtctttgcaatctcttactaggttgccagtgatgctcagcacattctggtttttctgatgcccctgaatctaggaacacttggctaaaaactgcaaattattttctcaatttcatcctgttaataatccatgagaaagctaatgaacatataatcttatccaacaataagagtgcttctttactagctttgtggagatgatttgtgggttggaagaagacttcgttgttgttttttattgtttcctcaacagtgtcggtgtgcatgtatgtacgtgcatgcgtgagtatgtatgtgttaaggataagggactgagcttaagatttctgcccttccccctccacttcacctctctgccctgtttctgcaacttttatcacttttccattttagttttccatgcaatgtttgagagactttgccctggttccaaaaaaaagaaaaggtttgagctggttgcagtggctctcacctgtagtcccagctcctcattaggctaaggtgggagaattacttgagcccaggagtttgagaccagcctgggaaacataaagagcccttgtctctaaaagttaaaaattaaaaaaaggtttgaatatcagttaacttagtgtttctggggtcttcccttcttttctagttcttacgtgccagaaatctgtggctcatgctagaacccaaaccttcttgggtttccctgatgggtcagaatatcactacatgcaaacaggggctgggaaaaagtgtcgtatcatccccccagaggagaggtgctcctggaaatcctcctggtgatgatggcagagctgtaggacagaggacaaatacaaagtagagacgaggtggagaggcagcggggcagtggggaaagtggaaaattggagcgtgatctactctttggaaatagttctgtgccctctggagcctgtgacacatggttccagcctgatttataacagcttttccaacagtcccagggtaaatagactagaacgatatttgagcttatgagaacagatgtggctgcatttgccttttaataaagacaagagtctggccaggcccagtggcctccagaactgtttctgctggcccaggagaggtacaagaacattattaggattggtgggagctctatttcctcttttcttttcacattcaccattgctaccataattttagtgactcatttaggatctgtggtggagagagtgaatgccagacctcccagattctctctccacccctccacccaccaccccaacaaaaagccacattgtactcactgaaccctggtactgtgaatggggcctttattctagccccgtttcagagtgtgctgcaagtttccttaagtgcaatcatcttgacctcaacttataaaaccataaaacaagagcgctagaaggaatttctgaaatggcctgattcaactttattctttttctttctcttttgtttgtaacagaaaagaacataggaccagaaaagtcaagggacttgtccaagataaaacaattggttgcccactgagctgatctgctgcccatgaatctagaaacacttggctgaaaactctgtagtttattttttcagtttcatcctgttaatattcccatgggaaagctaatggatatatactcccaataaatgataaataatgttctcctgtttacgcgtcaggggaaattagagcaggaactcacaacttggctccagtccctgatctcatgggtgaggtttgctgtagaatctgtatgttcaatggatggatttccagcttgaaggacttttgccttttatcactgttgaaacaaatgaagagatgggtatggcaataaggtcggaatccttgctggttagaagtatttgagtcttagagttgcaggtttacatttgcctcggaccctaggctaaaatataggactctttaccgtcaagtagcttctctttccaggtagaaagcttgtttattttaatgtcttccctgtctttgggcatgagttttcagtacctgaaagtctttttccttagcacttggtgcttggcttactttttggcctcagtagattatgtcctcctctgagaagacttccctgccctgttgccagtgttggtgggtgtctctatttcttcctggacacatctcattacagctcttgctgtgatgccgtgttattgttagctacacagtgaaaagggaagttgaatatttcattcttaaatacattattctaagtgaaagagatcagactaaaaaggctaaatactgtatgattccatttatatgaaattctggaaaaggaagaactacaggagtagaaaacagatcagtggttgcttgggagtaggggagggattgattacaaagaacatgagggatttttattgtgattggaactgttttatacattgtttagggtggtagctaccagattatatgtgtttgttaatactcatagaaccatatggcaaagggtgaattttatagaatgtaatttacaccttaacaaacccatctatacctaaataaataagaacacaaagaaaacagctcaaaaaaaaaaaaaaaaaaaaagaaaaagagaaaaaaacaaagccccaagccaatcaaaatttccaactcttgtctaataactggaatgatagaaatacagccttctttatttcaggagcccagttgttatgctttgatagaaataaaactccaactagcctcaaagattgtctgagttctttttgaagttagcatggaggtccccacaagataaacactagagccagttctaccactggccaagaagggtcaccttcacctctaggttctgcctctttccttcttccagaattgtgcccaagtacaattttaccttgtgaaatgggaataacaaaatggaagctgggtgggcccagaatccaaggagtttgggtctggtaagtgagccgtgatgctgcagttctccaggttgtattgtgcctgtctgatttgatggagggccctgtagaagctgagggtgaagctactagaagttccaggcccagcagagatgtgaagacaggggtgaaaaccagggggattaggtgacattctagttccacggttggtgtgaaatggcagggatcagatggaggctgtagctcagtaaagcccctggaaaaccctatggtttgacaagtgcgaggatgtgatttttctacctgccttgaccaggatagaccaagaattgcactttactacatccaaatgctgacgaaactgatgacaaaagctagaagagacaagcccaccaagtgccttctgacctctctcaggggggaccacttctgggatgctgattggggtcagctgaccacttccaggatgctgattaaggtggcaccattaagagatgggactggctttttaagaaatataatggtaatttagtattcacggtggacacttcaggaatttataattatagatgtgtagcctaaagaactgaacttctttaataaacccagctcaatcagggaactaccctttgtcctacttattattaccccaactttatgacttacattcaccctgattgattgaatgatgcttccaagcttcagattcactaaagctgctttgtccaatatgatagccattatccatatgaggtcatgaacatttaaatttatagtaattaaagttaagtacaacatataatttagtccctaagttgcattgatcacattttaagtgctcaacagttagatgaagtggctgttcttttgggcagtgcgtattgataggatgtttccatcactgcagaaagatttattggacaatactgtactacagactatttcctcaaagatgtaaaacttgagtgatctctaattgtcaattgaataaaaacatttagtcctaaaacaatcaagttcatctcatgtgccctatcactcaggttaacctttctcggttcccagggtgatcctgccatcctgcagtgatggagattttgctctcattgagtctgtctggattatttctggttcatggacaatctggtttattcctgtcttcatatcatctggacctctttcctggtggtaagtgctgaggagatgctgtcattgtgttctgggttggatgtctttggaaatctgggaatattctgacaaatttcttccttctcgacccttaatgatccaatcaactataggccagtctggatggcatggatgagaaggttgcctgagtcatattctatacttctaacacaattgtcaccctcaagttgactagtttgcatctttcttccctgcaggttgtttttttttcagctgtgtctgtgcctatatttgctttgtacctgtggtgaaagttatgctgcttgcaattttctggtattaggttggtgcaaaagtaattgcagttttaccattaaaggtaatggcaaaaaccgcaattacttttgaaccaatctgatagaaaaccctcttatctagtgctgtgctggtaatgtttaacaaatgtctctaagagtggaaaaggccttgtgattggctgaatatcatgatataaatactcccactgtgatggatttcaaattaacaacttgacttcttagaacacagagctgggaagttttctcaccatgcaggcacaataactgcaaaaaacctcaagagtataatagtagtaaatgtcataaaatagatgataacttgtgattatttgttacttttgtttttgttataatttattttacttcaagtttgtataattccatttctaataatggccatgtttaacagctggctcacagaattctgaaaaatttaggactggctcctgggagctggtataagcaggctccagatcaccactgcccccctctttttactgaggacatataattggcctttacaatgagtggtctaattgtaacccctttgtatgtacagcaggattggggagtacccttgaagattcatagattgtaggaatctgtcatttgtgaccactgtaggactgtctaattttagcagacagatctgccatcgaatgtgagtaaatgtttgcaaaaatttaaataattaaattggcccaggaacagaaatctctgcctcttaagagggcttcgcctggcctgcttgagcccgtctgagtgaaccacatgtgtgctggtagggaatgcaggtggaataggaatgacttctggctcgtccagagctctttgctctcctattaatactaccgctttgagaaagctaaagaggtttgagtgcatgacattttctgtttttatttaggaagttcagttctgaaagatggactcctttgtcttatactttattgcacttaaaaaaaactttcctcagtgcttaaaagttgtttgagttttttctctaacaactggggactcctgagaggtgagatcaagtgtctgttgcagtgatttttttttaagcacctggtatgaagtctggtctggagaaagtgctcaataaatgtgggctgaataaaggctgagatgctagaggcatgaactggttcaggatagggagtagacaacttgtaccatgctgttggtttaggttactgataattctgggtatgttatgaaaactgttgagtatcaaaggagatccctgagtgcttttctgctgtttttctcaggtccttagaccccctatggggcaggaaaggagagtggcagaataaagatagtatgagcctgttagctaagagctctgccacaaagcctagatttctagttcctaactgcatgattctgggcaaatcatgcctccaagcctcagtttccacacctctaacatggtagtaatcactcctacttcacagaattggcaaaattggatgagatgaagcatgcaaaatggttggcactcaaaacatgaatgttattgacataatgcacttccatttctttggtgttgggtaaaatggaagcagcttccctcacagttgcatttctaagagataacaatatatggatacaacctggacccagcagaaccatagcaagaacagttattttacccctcctgtgtaccaggtgctattctagatgccaggaacaaagaggttagtaagtcatgcttactgcctttaaccaatccagagatcagtgagtgaatggaatacatagtcatttatcatgatgcagtgtcaaacaggaattttttcacgggaagaggatttgaaaaaaagaaattgactaagaaaaacattttgactgttaactttgagcaaacttgaccaaacatctcccagacctctctctcacaacctcttttgagagctcttgactttcaaaatcgaatccaggtgcaccccccaagataagtgggcagcctcatggcctttctcttacagtcaaaggtaaatgatgcagctggatattacaaagctttctaccttgacttgatgtctatgcctgttaaagcaagcagccagcgtctgacatctcagggttgttacaactttgattatttttggatggaggcactgctgtccttatttcggtgcctctcaattatgcctcgtgtctcaactgctcctgaaccttcattccataaaacaaaagagattgcctgctgcggttttcataggtctttgtggagtctctttagatttgggcattttgaggtcaatgcggtgagtgtttttttcatgcgtttgtacttttctagttccctccccaacacttaccctcacccctacccaagatagtttttatagttttatgaaatatgcatcataacttctacagagaggacaggaggagtgcaaacatccaagaagatacaactttaagagaaattaattaatttttccccactctcccttgtgtgtcctcagtgctctgaacccttctgaaacaaacgagacccatgtgaattgcacatgaggtaggcagttacctcctcagaacagtttgggcggtgcacagcagatagaattttcatttatgaacaaatttgtccaattcccaggtctttcatattcgtttttgaggttttggtacttaagtgtatcttactaacatgaatgtaccctagaaatggtgctaccccccagcagttctcctcatttcagtcaggaattgttaagggcaagaatgagaaagatttcaggacttggaggtgggggaaagaggagctatcaaagaatagcaagggccttgaaagacaaaccccagctactactgacaccaggctggacagctgcatatcctccaagccagcagtcctatactatggtcagcctagcaccagcattgacactacctggaagcttcatagaactgcagaatctcaggctgctcaagatttgcagaatcagaatctctgggggcagctggggtccagaaatctgtgtttgaatgagcccccaggtgatcctgatgcaccccaaagtttgagaagcaccactataagtcactgattcagacccagttttcttcaacttttcagcataagtagcaggtgtatggttttataaaatatagacttcctctggcataagaagattttaatgtgtgtaccctattgttcaagatacttacaatgtttcgctgcaaacttacaatgggaaatgtaatttgtctcttactgtgctgcaatagcccccttccttgcagttcttacaaaagagcagcttcagagacaaatcttgttaatggtaattatgtgatgctgcagaacatttttcatcattcttcttgatccagaaaatattggctgtgattcaaaaagatttgtgtaggctctcaaacccctcatagatttccttatagaactgatcacctgtttgagtaggaatatagatgtaaagaaaaaaaatatacatatatggtaggctaaaaagagggccagcaattgaatgtctgagaattccatttgattttttgctgataacaggagaagttccccacccccttttcttgggtaatattctatttgttgtgttttagaactcagtaaagcaaattgcacttttgaaaaatccctccagtagtagaattgggcacagggcaattccaagtgactggagtgcacctcagaacatgggagaacccttgcttgtccttgtgactcactggccataggaccttggataagtcaaccactgatatggtttggctctttgtccccacccaaaactcatctggtagctcccgtaattcccacatgttgtgggaggaacctggagggagatgactgaatcgtgggggcagatctttcccatactgtttttttttttttttttttttttttttttgagacggagtctcgctctgtcgcccaggctggagtgcagtggtgcaatctcggctcactgcaagctacgcctcccgggttcatgccattctcctgcctcagcctccagagtagctgggactacaggcgcctgccaccatgcccagctaattttttgtatttttagtagagacggggtttcaccatgttagccaggatggtctcgacctcctgacctcgtgatccacctgcctcggcctcccaaagtgctgggattacaggcatgagccactgcgcccggccgagctgatggttttaaaaatgggagtttctctgcacaagccttctctttgccgtcatccacataagatgtgatttgctcctccttgccttctgccatgttttgtgaggcttccccaaccacgtggagctgtgagttttccattaaatctctttcctttgtaaattgcccattctcgggtatgtcattattagcagtgtgaaaacggactaatacagtaaattggtactaggaatggggtactgctgaaaagataaccaaaaatgtggaagcgactttggagctgggtaacaggcgaggttggaacaatttggaggggtcagaagaagacgggaaaatgtgggaaagtttggaactccctagagacttgttgaatggctttgctcaagatgctgatagcaatatggagaataaagtccacgctgaggtggtctcagatggaaatgaggaatttttgggaactggagcaaagatgacccttgttatgttttagcaaagagactggcggcattttgcctctgccctcgagatttgtggaactttgaacttgagagagatgatttagggtatctggcagaagaaattctaagcagcaaagcattcaagaggtgacttgcgtgctgttaaaggcattcaggtttttaagggaagcagagcataaaagatagaaaaatgtgtagcctgacaatgtgatagaaaataaaatcccattttctgagaagaaattaaagccagctgcagaaatttgcataagtaatgagctgaatgttaatccccaagacaatggggaaaatatctccagggcatgtcagaggtcctcatggcaacccctctcatcacaagtgtggaggtttaggaggaaaaaatggttttgtgggacaagcccagggtctctctgctgtatgcagtctagggacttggtgccctgtgtcccaggtgctccagccattactaaaagggcccagggtacagccagggctgttgcttcagagggtttaagccccaagccttggcagcttccacatgctgttgagcctgtgggtccacagaagtcaagaactgaggtttgggaacttctgcctagatttcagaagatgtatggaaacacctggatgcccaggcagaagtttgctgcagggacagggctctgatagagaacctctgctagagcaatgcagaagggacatgtgggggtcagagcccccacacagagtccctactggggcactgcctggtggagctgtgagaaaagggccaccatcctccagatcccacaatggtagatccaccaatggcttgtgctgtgcacctggaaaagccacagacactcaatgccagcttgtgaaagcagccaggagaaggctgtaccctgcaaagccacaggggtggagctgcccaagattacgggaacctacctctttcatcagtgtgacctggatatgagacaaggagtcaaaggagatcactttggagttttaagatttgacagccctgctgggtttcagacttgcatggggcctgtagcccctttgttttggccaatttctcccatttggaatgactgtatttacccaatccctgtacccgcattgtgtctaggaagtaactaacttgcctttgatttttcaggctcgtaggcagaagggacttgccttgtctcggatgacactttggactgtgaactttttgagttgagttgagactttgggggactgttgagaaggcatgattggttttgaaatgtgaagacatgagatttgagaggggccagaggcaaaatgatacggtttggctctttgtccccacccaaatctcatcttgtagctcccataataaccacatgttgtgagagaaacctggtgggagattattgaatcatgggggtgggcctctcccatgctgttctcgtgatagtgaatgggtctcactagatctgatggtttttaaaaatgggagtttctctgcataggccctctttttgcctgctgccttacacataagatgtgacttgctcctccttgccttgttacatgattgtgaggcttccctagccacgtggaactatgagttctccattaaatctctttcctttgtaaattgcccaatctcaggtatgtctttatcagcaacgtgaaaacagactaatactaccacttgctgagccttggtgtccttttctataaagtaggattgtagtcccctcctattttaagcatttttgtggtgataaaaagaaaatgtatataagagtcattgcaataatgataaacaggtatgaagcataccagaaggaaggtagcctaggaccacatatcaaaattcatccttgtaccccaacccctctccttcctctctgcagaaacaaaatagtctgagaattggaagggaacatctgagatacacacgctcctgatctttccagggatggagagccctggcaccttggtagaagcagctggctttttctagagatccagattgaagtctacagattttgcagctacttaggggaggctcatccgggagaggccttggagaggaaatgcacccccctactcagggcatgtgatctgtggagaggctctctgaccctgtgaccccagtaagcctagaggaagccccagtggcctgggctgctgctagaccttatatggggaaaggattagcacttctacctggagaggcaagcatttgacttctcatgaacaaacaatttagccaaaaggactagagttctgtaatgctttacctggccaagagatcatctatcagtgccagcaataggcaagtcttttcacagtggccaggtctcagagtagtagaggaataactagaaaacaaaacttcatgagttttgaggaaaacattcaaggacgcagttcaaggacacagtctatcaaataataataatagattcacaacatggagctcaagataggggaatgtgcaaagtacagaaaggtgggatcagcaatggcccctgctgttacatgtttatagttacaaggaaaagaaaagcaacacaatgcaacagagagcacacaaaatattttggacaaataaactttatatcagttattaaaataaatataaatcagtcaaattctatcagagtagaaagattatcagtgtataaagcaaaaataatcaacttcatgctatttagaattatgatacataaaacactgatgataaaatatggataataatttatcaaagatacactaggaaatcagggtaaaaatgaagctaaggtgagaatattaatggcaaacaaaacaaaatacaacaataaaatatcaaactgagagaagaaataatagtaagcattttattcaaaagttgcaaaaatttatgtatcaccatgtctgccaaaacaaactagaaatacaagaaaactttgacaatgcgcaattataatgtaaccgttgataaatagctttttgaattctaaatatcaaataagcaaaaagtaagaaacaatatactaaagaatataatcaacaaactcaacttagtagaaacatgttaggatatggacattgtgagtagtgaatatagacctttctttttgtaaactagagacagaaaatgtacattcttccctattttgacggagaatctactagtattgatcatgtatgtagccacaaagaaagtcttaataaaataatccaaaataaagattttataaaacacattctctattaagctagaaataagcaattaaaaggtcagaaataataactacatggaagttaaaaatattcttctaaataattactagatcaataaagaaattaaagtaaaattacatactatttaaggtatttggaaaatagtggaaaaaaaacattttgtacaaaaacctgtgggatgtaattacagctatattatgcaaaaatatatctttattgcttttgtaatttaaaaataactataagtaggtgaacttcaaattaagaaatcagaaaaacaatgggaaccaatataaatgagaaaagatgtaaattatcaaaaaaatagaaatagaaaaaataatagaaaacagaaaaaagagtttcattgaaaggacaaagtagattggcaagtattgatttttttaaaaaagcaaaaatgtagaatataagacatcagaaggcagagaaaccatagatctatgagagatttaaaaattattggagagtattatatataaatacatggcaataaattttattatctgaaaaagtataatcaaataaaattgacccagcacgattgaaaacattcgattaggtcaataaccagtaaattgctggtaaaataattaaataactttcatttaaaaatatcactaggcccagtgagttttatagtcaaatttggcctaagttttaaaagctaaaaaaacttctctgcaatttgagtgattaaggactgcagaaaaatgatggatagtgttcttgttcattttatcaaacttacataagcttaatggcaaaacctgttaaggttcatatataaaataaatctgtgaatcaagttacttgtgaatacagatggagattttaaaaaataaagcgttagcaaagaaatttcagctgaatagtaggagaataagattgtcacacccgaatggtacttattcgaagaattcaaagagatttcaaattttgaaatatattacgtggctccatatttcaacaaattagagggaaaaccatataattataccactagctagtgaagggttactttataaaattcatcatctagtcttaaaaaaaaaaatttaagtaaaatttgaatagaagggaagtagccatgataaagattatttacttaacagaaaacatgagaatggatggtaaaatcctgaaatcaattttgttacaatatggaaaaattagagatgacttttattactatggaaattgaacagtgtttgacaagtgctaattgatgcaatgaaaatagtaaataaaataatcagcataaatacagcaaaggaagagattcagttattgtattcttacaaaattaaacagactccactaaagcaactataagcaactattaaaataattaggagaacatagagattgggggtgagagggactggataaatacataaaatcgacagcctctttctataacagaataaccaagttagaaatgggaagaaattatttgtactagtaacaaaataataaaatacttatatccttctcattttttttagttatatgtcagaaatgaagaaaattataaaatcttactcaagtatatcaaacaagggattttgaaaaataccttatttttggatgggaggactaatatcataaaaataccaatttatcccaatttaatatataaatataatgcaatcttaatctgaattggacttggtcaaaataattaataattccattgaaagactaaataaaattcaagattttgaaaaaggaatgactagacatgtgatttaacatttattaaaaatgtaaaaagctcttatattagttttctattattcctgtagtaaattactacaaacttggcttaaaacaacagagatttattatctcacagttctggagaagtttgaaatcaaggaatcctcaaggttatgcttgtgctggaggctctaggaggtctttcgttccctgcctcttccagcctctgttggcttctagtactcccttacttgtggctacatcactctggtctctgcctctgtgattttctgtctttgtaatttccctctgtcttctcttataagcacatattttgtgatggcatttaaggcctatgccaataatccgggataatcttctcatctcaaaatcctcaaaatcacatttacagaagctttttataaatttaaataaggtaacatttacaggttcctgtgattaaggtgtggatatcttttggagtgggggaggtggcatttctcagcctactacagccactgcaatcaaaacatttcactattagagcagacaaagaggtcaatggatagaatagtccagacatagaaccaagtacaaatgggaaccagaaatgtggcaaaggtgggatttcagttcactggaaaaaaagatgctttatttggtaacttatctatagaagagaaaataaaactagatacctatcttattaccatataaaaaataaacccctggttcatcaaatgtgcaaatgcagaagaagaaaaattagcagaaattctaggataatatctgcagaagtttggccagtaagggacagacatatatgactgtactgacagtccccaacttagaatggtttgagttacgatttttcaactttacaatggtccaaaagcaatatgcagtcagcatgctactccacctacaatggggctatgtctggataaagctgttataaattgaaaatattataagctaaaaatgaacttttaatattttcaatttatgatggctttatcaggacataaccccacagtaagccaaggtgcatctgtataaaaatataaaaataaaagactaacatgtcataaacatctttccaaagatcaagattctaaagttagacaataattttcatatttttcttcatacatcttctattttttgtgttacaatgaacattactatatatgcaataattaaaatgaataacatttaaaggagaaaaatattatatatgatttgggcccacataggtttgcatcttggctacattccttacttagtacttctgaaacttactttctccatctgtgaaaggaggacaggttgaggtattccatgtttagaagtgttacagtgaggaattgtaagtatagcaaactgtagagaaacaaggagtgaggtaaggagagaatgaatatctttctttttttttttggaaacggagtctcgttctccccaggctggagtgcagtggcgcaatctcggctcactgcaacctccgcctcccgggttcacgccattctcctgcctcagcctcccgagtagctgggactacaggcgcccgccaccatgcccggctaatttttgtatttttagtagagacggggtttcaccatgttagccaggatggtctcgatttcctgacctcgtgatccgcccgcctcggcctcccaaagtgctgggattacaggcgtgagccaccgcgcccggcagaagatgagtatcttttagttgatttgaaaagtaatttacataatcagtaagaaacctgagaacgtgtatattgacattaagaaataatggggagactgggaattacggttagaactaaagccccatctctaccccaaacactgtttgctcccaccactagtggttggggctcaaaagtatgtatgtttccaactggcatggtgatgagaacacactttctttcaaaatgactacttgcaactttattgtcttaactttcatttcctggtaaagtcttgaaagtcttgaacattttttccttttcattttatgttcccaggttctgaatttattttgctgaaagagagagatactttctgaattttaccagcaaggctattacaggaattccttaaagagtttagctaaggggactttgaattacaaaaagcacaatttcccaaaccagtatccatcagttaggacacattcaagccctaggagattattacagccgttttttttttttgtttgtttttgttttttttttaacaattaccatcactgacctgaataataaattagcattactcttagagactagaattaaagagctgaaaaattctttctttccttcccttcatttcagagggaaagaaaccaaggcggaggaaagatcaagttgacctaccaatgtcacactgcttgccagcaccagcatctttcacctttcagtccaccttccttcccacacagatacactgcccagtataaatcctgaaaaaagggtctcctccagactgccccaaagggtctattgtccctatgtcttgcagacttgaaaggctagttttcttcttcgaagggatagaaagtgccagaacttcattgtccacctccaacatgccgctgtgaatctttccagcctgaattccacaggcatcacaaagtgtccttgacacttccaaatacgagtgaaggatctcaggaatccattaactatgctgatggattaaatggtcatgtatatctgataggctgactaacagaggcaggaatgggaaaagaaaaaccctgacagaggtttgctattaaaattttctctaagaggcatggggcaaacaactggctttaggctggcatgccattcatctgtttctaagtagggttaacactatagggagttattttaagttttttgcttgcatagttgagagaaaaataatttcccttatctttccaaacttaatgtcagacaacttgacaatccaccaacgctccgtaactagaatgtcagtccagacttctccctttttggcctatcgaaggagcagtgtatacttcctagaagctggtggggaagtcttatttttatatttcctgaatcacagggagcttttatcaagatctgtgcagctctttttggtctaataaaatcctcttgtggcatcaaagcttgggtttccctagaaacagaccctgagtctaggattgagatgcaaatcaattatgtgcaattgtgattgcaagaagtacctacagggaagtaaggtgctgagaccagaaagggaaggagaccaacagtgtgttaatgacaggctacaccagggggagacaaggctcaattccattgggaacctttagggggcagtgtagaacacacttcagaattgtccctcggaagtggtgagaagctggggtatttatttattaactctcattcctccttagccgaagcctgcttcttgaggtatgaactcaccagcatttcagccctgtttggtgggagcagagagaaagcccacagacagggagttggcagctgcctgcagcaggtcaccgttactggggcaccaataccatttggtataatgaccttctaggaagataactcacttcctaattttcaacaaccttatttcataaataggttagggcttctaacttgacttcacaaaaataatttaggcatttatacttaagcagagtgcaaatactaaattcattaattggttagcactctttttgtttctcatattaaaggaaataatagttttaattaagattctgttttttgtttttgtttctattttgctattacctggaaagatcgagagtggctgggtcctgaccaggaagttaaagagcgacacagtttgctcaatgatgacatttaagcccatatcacctcatcggtgggaaatgaggcttccacaaactttagcttttcaaacgtatgagtcattggagctgacaaaagagaatacaagtgaaaatgttcagtgcatttgcattgcgactaaaagtcaccatagttatcccaattatgaaatctggccaatggggaatgccatggtccttccggtatgtgtttctctggattctcttctattcccatccttctcagcacttattacctttccagggactagactcaagaatgcaggtgtgaaagcattatagccaatcctattttgctttgtgtgagaatattctctagcattgacagtttgacggtccttgttgtttttaaaattgtgacaattttcttcaaatctggacttgctctgatattaaggctggcaccccgatgtgtgtgctgcattgacatctgaggcttgtctcattgccagcaggtctcaaattctagttttctgtctaagatataagggcagaatgttatttatgggcaattacaaagatcaccttgctccatttgatttattggagagatttcaatcaaggcttagagctcatcccaagcagacaaccatgctgacagtatttaatgatttattgaatgctggcaactccagctcttcctctttttcagttttaagttggtggatttgggggagtgcttcagatgcactcaaagctatggtaatatttggtagattctgaagtatgcttgaagcccttttttttctttccgttaattaggtttgttgtatttgctagtgtgcatagataggaagggcttgaagtatcacctgagggtctttagctcttcctgactgtaggattgactgccaagatgttgtgatgctactttaactggcggagacagggacactcaggaaaacagagttaatgatgaacttactgtttaataacacaaagtgaacttatttacatagagtgtatacagacgcatatgggttataggatatattttccaaatatgccaatattatgttttgttaaacatttttcataaatgaggtataatttacagattgaaatgcatgaatattatgtacatggatcaatgattgtatatatcttgatcaagagatcaccccagaaactccctcctgtttccagccagctctcctcatctttagccaatcacacttatgttttctatcactatagaacagttttgctcattcttgaatttaacataaaggaagtcatgtagaatgcacttttgtttggcatgtttcacccattatcatgttttgtttttgagattcaactgtgtacttgcgtgtatcaaggttgtttcttcttattgctgaacagtattcagttgtatgaatataccacaatgtatttctcaaatctcctgttcatgaatatttggattgtttccaattgttggttagtatgaataaagctgctataaataatcctgtacaagatattttgtgggcatatgttttcatttctcacataaaaactagtatcaagattgctgggtcataagaaaggcacgtgtaaattcacgttatttctggcttagaaatgtatgcttacggttacatgattaaatgtaatggatttctgcagaccactcctaaactttagagtggaccactcctaaactttatctatacatagtgtcatagacatttctatctatatacaacatattgttcagcaactcaaagtgtatgttatttgctttattggcatgtgagaatgtagtgtaaaggccattttgaggagaatattcagtctatgatgtctctcaaattcaattaccatcttgaacaagaaaggagccagtgacatcaattaatacttattgtgttgtcttgcatattcaggtcttccctaagaagaggcccttcttgaaaccaggtcctgcatgagctaaaacagatggctgatgtaatcacccacaaatagtgtgttgtaaaagggtgcaaactagataccttctaaatgaccaaagaaaatgcaaagtcagaagtgatttgcaagagcaactaagaatagagtcagcgctacattatagacaatgatgataggattccaagaactgtataaattactcatttatttaaaattttttgtcctctgttttttctgcagtgatttgtaagaagttaagtaagtaagtaagcctcctaatgaaacggtggtggcaatctttagagaaaccatattttattctgggagctatgcagaaaggaaactaggcatggaaatcagctggtgggactttggaatttgtggttggtcggctgggcctggtggctcacacctgtaatcccagcactctgggaggctgaggtgggcagatcccttgagctcaggagttcaagaccagcctggccgatatggtgaaacctcatctctactaaaaaaatacaaaaattagctgaggtgggtgttgcacacttgtaatcccagctacttgggaggctgaggcaggagaatcactggaatccaggaggtggagtttgcagtgagctgaggtcatgtcactgcactcaagcctgggcaacagagcaagattctgtctcaaaaaaaaaaaaaaaaaaagaaaaacaaaaaggaatttgttgttggcaagctgatggtgggatgctctcttcagttcttgaggctcaggctaggaacagtattgtaaaactgtcatccattgctgtgaaccaaccaactgctgctcttgtactggtctagttagtctctcactgtatctctcactgttgtgtcattgtgtgaccttgacaagtccacttgacatttggttttggcagattcccctgggaggttttgcttggtgaatacaatgctagaattttctgctgttatccaggcaaaggtgatgtaattccttaattaaatgattggatttcagtctgcactcttttagcctgtgaatttcctacatgaacattgcctagcttgatgatgtaggagttttgttgcttggcctcagctcttgatggcaattcagtttgattaaaatgtctggagactatcttcaagtagagtggcctttgttgtccattgtcattggatcgttgagtggacgtctgtatcttctggccctctccacttgaactgtatatcatttatgaaatactgccaggctgagaatgcaatctcatcaggaagatttggtgagattaattaatgccttagttgtttgggagctagagggctgtaactcttcacttgcaaaagtgccagcctatggcatttcccaaatgtaggttactaaaggacaagtccttatgttctgaaaaagtattagatgtccagacttccttcctccttttggtgggaattgcagtttttaaaattcaacattggattctaagtttctccaacacttttttctttgtaagcaggaatccaactcaatttatttgctcgatcttttgtcaccatatgtcctcagtcacccagtgagaatggaagcagcaggcaatttaatttgttcacagtataatcttgggtccctttgagtaagagcttttagcagctctgctccctaattgtggaatttactaccgatttctagtcacagtgccctgcctgtccctgcttaaataaactaaagcttactgcattagctgaagcatttgaaactcttgggtaggggtatgggcagtgggtaaaagggtctcaaagatggggagaaatgtttattgttcactgcccaggttttctccctggaaggaaggatacacaaattctcactcatataattcatgtttctgtttcaggagtctgcataagaaaaataagtgtaataaaataaaattaaagaaaacattggaggagaagcatggagaagggcaagagggaaaaaaaaatagagggaaaagccaagagcttggaggagcagaggaggaaatgaatctacctattctctcaaatcctttcctcttacttctctgtaactgcagttaatttagtggctttcttaattcagtgacatccacatatatcagagcagttctttttgctgaaatattaatttgccttgagttggactgtatgaaacattaaccacagatttggaaactgacatgcacaatgttcctgttcttgctttgctgggagcctttgcctggggaatgaaggccccagggaaggactagaacccctgcaaaccccctgtccatctcctcagctgctgcatccataccccgtagagcagcagttacaaacatgggttaattttctggaaccatttcaccctaagtctctaggatgcacacaagatccaacatttttctttgttacttgctcatttaatttattaactgtaagacagagagagaacatttataagaatactagtaaaagctaagtggtagaaaaggtgaacagatttatgaatgtgatttcactataggcttcccaggggagttggaaatcctttcccatttctatacaatggggctatatgaagactcactggaactagatgtcacggcataaggtgcaaaaaatgttgtgaatccgagggcttccagtgacctgcattaggggcataagatgacgtgatgagtaaagatttcagctttcaaggaggtagaaggaaatggttgatggtacttacttgcaaacacacacacacacacacacacacacacacacacactctttacatcaataaggtaacacctggcatctttttcacagtgagaagattctggaggccaagcaggtgcctggggttctgaagctctctactcagcctcttgaggaatctgagtatttataaggctttggggattaagggcagcatcttttttcacagctgagcttagagtcctcttacaacaggagcccctgttataatgtgtgaagaaaatctccaccttgcacagaaggctgcaatgcatccatggtgaaggagtttcctcatttataattaagttcaggaagcagactagtgtgttctttttcagataaaggaatggccttcatgctgagaaaatttaaccctacactactattaggtgtcagagtccttttaaagatgagatgagccagacaagtgaggaaggtgagaattggattagtttggaggataggatagccacaggggtatgaggcatgggataatttaaggtagcatcaggagaagccaagaactgaatcaaagtcaggcaggatcagagaggctgagagaatggatcatccatgggactatagtctaaggtggaggtagaacttgagtagctcaattaaaatgccaaacttaaggagaatggataaggtgacctgccattttgctccctgataccctctccaagtgttgacaagagtctagcatgtggctgatgctcgataaatattcattaattgaataaatgaataagtgaatgaaatagaaaactgtagagactgggcagtatattgagacacattctgaagaacctaggaataagccagtaatacactgagtagaacaggggcatggtaccctattcggccccaagcacagggaagaatggcttcatggaacaaggcatgggttctgatgggtgcttagattagaatttcgtgaaaggatggcttgaatgtcaaatgacccatcttcaagctcatgacttttacattcctgccgattggacataggtctgttatctgagcctggcatggaggaatctctaggccaggagcaaagggtctctcagctaaaggaatctgaagagttggagcactggttttccttgatttaaccggctccaggaaaactcacatttcatggctaaatgtaagggtacaggcaagaaaagagatttgttgttgaggtttgtgccttcaaatcttaagtgatagaagtgtacatgtgagtgtgtatgatgtgtgcgcatgtgtatttataggagattttgagatagtacacagaagcaggaattagagagaaggtcacacctgcaggcacatagaaatagtagagatgttagagatgcagagaaatacagagatacacagaaagagaatgagaaactaaagaatagagagtcagagagaggctgtttggaatctcccctccccattaatcatgatagttggtacgattgaggatgaggttgttctttaataattgaaactctagggatccacttctgctggatctccgaaggtttggataagttttcaaaaaaagaaaaaatatcacctttgaaatagaagttactccctagaaagacacacctgtgattatgaaataataaaactgtttacatccagaaatatagaaaatacatgcagatgtgtcccagtcccccaagatgtgtgctgggcaaggaacgaggccttgcaggctgttgtgctgaggctagagattctagttacaggttctttcctaagattcccttatacatctacgtccacgtagatacctgacactgtgataactgaaaaaaatatttatggttcaagtgtggtggctcacgcctgtaatcccagcactttgggaggctgaggggggtggatcacctgaggtcaggagttcaagaccagcctggccaacatgacaaaaccccatctgtactaaaagtacaaaaattagccaagcatggtggtgcgtgcctgtaatcccagctacttgggaggctgaggcaggagaatctgttgaacatgggaggcagagattgcagtgagctggggttatgccactgcactccagcctgggcaataagagtgaaactcttgtctcaaaaaattatggatcaaaaccttaataagcagatgcccttttcattgttcttgctcatatccagataagagctaagccagtttccttcctgactcctccaccccacctcacgagtaaacagaaataattataaattatactgcagaggctagtcaagaggaagtcttccaagcccaggctttaattcatcttgggtgatagttcatttcacacagccccaccagacaggaataacttattttaattggctatcatttgtgaaccggcgcatggtctactttagaaatgacactgccactttattgtaactgcatttctctgactcatggttatgaggggagtagatcaatttttcataaatcataaaagtatgtagaaaaataaaatggatttctttccccagtcctttctagctttcccacacaataccaaaaagaaggctatccgattctgtgaccatccacctatacttggaatccccccaaagaagatggccttaggaggaaagaaccaacaatagtcacagcatgttgaaaaagaaaaaaaaaacaaaaaaaaaacaggccattctccaagcttctttggccctttgttaactggtctgacacagtgaagattcctgttatcctgatgaaagcaattgctttttctcccatagagtccttgttctttattagaaacatcacttaatgttcccagggactaggataatgacctatgtaatggccttaggaatcctaacctttcaaggtaagagaggtagcaaagatatgcccaagagcatggatagatgaggagggacagtaagttcctgtgcttcctttggagatctctgtcattacattgctgggtggacagaagacctgacaaaaacctcagtgtcatcttctttttagccaagaccctttttggaaggggttggaaggggatggaaggagggcacccactctgttgtcaagaactggcatcttagcaaagacagactcacagtgggtggattaatctaaataggggcagaggaatcatgtcaattccacccacaatcactctgtatgtcccctttcctcccttagctgcctgaggtctatatacaaattgctctccaacacctgctcagagatccatgtcttctccctgcagaaggcagccacttttggttccactgaagcactttagtcatacgcatttagattatagaagaggtcacttgcatagttaataaagtttttttttaaactagagaacacgatttttgagaaataggagggacattaactgtcaaagatatgtaggtatgtgtgtgggtatgcatattcgtacatatggtttcaatcctatccagaatctacattataaaggtaaaagcttaaacaatgccaaagactgtgaagtttctattagtgcacacactttggaagagtacacgttcatgtatgtggggtgtgtgtgtgaacacaagaggttatcagtgtacaaatagccagaaactgtttttaagtgaggtgtttaaacttgaaatatgttcccttacaaaagagattatggaaggtagattccctggcttcccacatccaaaaatgaataagcctatcagactattacagatttaccaaaattttttttaaagtaataatgttcactcacatttttttggtaacgtcataaagtatatttggaggcattgattcacttcgtggaggtccttggtttcctctttcctttcttgcggtgtttctggtttctgaacaattgaacatcccttactctctccctagtaaaaacaaggttctctccaacttagctcctcataagttattacctaacttagctgttaggtaataaatgaaagaaaacccaccattgaagtctaagggaggtgttaaagtttgatgggcaccttttcatgtgtttgcataaaacctcatatgtatgtgcaattttgtgtatatggatacagaattacacatgtatgtatggcggggttagataggtgtacatcagacagtgtgactgtaatctgtaaatgttcaagaataaccattcttaggtaaaactggtatattttagtttgaaatacttcagtgggcaaaattttcttaagaattattgacttgggaatatttttatgcaatctattccaactatttcaaatttatttactttgcttattaataaatggtacagtttagtattggataactgattcatggaaacatataggagtgaggagcttcttaattctaattttgtagagttgttttggatgtttgccagagtcttctggttctagaactactagttttatattctgaatcatttacttagtgggctttcttgttaactcatctctggctcccgtctataaataaagtgagtttaggtccatttcgccatgtctgtcttccagtgtgtcaatttacttttcaaatgttgttcggtgagcatacctttaagaactgggttgccaagatggacacaatagaaagatacaattactcaactaagaatgctggagacatctctgagcaggtatggagataaagatgtctggaaagtttattgcctttaatttgcacagctttccgcccccaccctcctcccctgcctcccatctgtaggtgttagatctttaagggagcttgacatttagctttgaaatgaatacacttttttggttcttaacaaccagggtaagttttcataggtaatttagcaaatgtcaaacttttctaataatgtagatttgatttatatatccaagcttgctattctcattatccagacatctcagaagttgggtggctttcaagccaaggcagcccccatcaccattcacactcacacacgcaccccactcacttttcttttttctttttctttcttttcttttctttctttctttttttttttttttttttgagacggagtcttgctctgttgcccaggctggagtgcagtggcgcgatctcggctcactgcaagctccactaccgggttcatgccattctcctgcctcaacctcccgagtagctgggactacaggcgcccgccaccacgcccggctaatttttttgtatttttagtagagacggggttcaccgtattagccacgatggtctcgatctcctgaccttgtgatctgcccgcctcggcctcccaaagtgctgggattacaggcgtgagccaccccgcccggcccccactcacttttcttctttgcatttctgtctctgtcacctactctgcattctctctacctccaccagttaggataccagtgggtacaaataccagatgtttcttttcctttctgctttctccttatcacacaaacaatagtcacttttctaataacacgttttcctgtctttcaatgattaaagtgggctcttaagtttgtaacctggcaatcaggaaatatttgttaaatgcctattgcatgcaaggtcctcacagtgcacccttcctaaaggacttaactagcatcaatttctatttgtttattttctggaaacagcatcctgacttattttggtgatccttctttttttcttggtgtgtatcatttggttcatgtcaaagtcccacagtgaaactgactctactttcacttcctcatcatgcaatttagcctgtcaaattggagcctagcctcccctggcctcagtgatgatgggttaaaaataggcaggttacctgatgaggaccaaccagagcttagaatgaccatgaataaagatctctttcccattggagttattgaaaaatgaattgtaggcctggaatggtgtgtccatctatggggataacctgcctgagaatgaagccacctcagagagaagcagaatcaggaagtggagaagggcatactttgagcccctagagccaccacacttaaaggcagaatcctcctcttggtcttttctttatttttttcttaagccaatttgagttgaaattttttgtcatttgcaacggaatgagacatgttcctctcccccaagagctagcgtgtggtatagtgataccaggttgtgtttgatatatggggcgatagagacacatgtggggtggaagctgtccctgtgagtatggagtgtctgaaggcttcacatcgtcaaggatgtggaattccagccaagccttggagtatgacgatggtttgggaagccagagagggtcctcatgtgaatatctgtgcctcgttccactcctttcagatggattcggtctcctctgggtgtcttctctctctgtttatccattcttgcatccttttctcgggatttcgtccttggatgactttctattctattctcaagctgttgtttcaatccacgccatatgcaaataattctgaatgcaaataattcacctctgtatgcaaataattctgaaatccatctttcctaccaagacattagttttaaaataaaggcgacatttccaactggcaacaatcttcacctttatgtctgagaggcctctcacacttaatatactaagctaaattcattactttccccagtcctactttttttttttctctcttttttttgggacagagtcttgctctgtcacccaggctggagcacagtggcgtgaactcagcctactgcaacctctgcctcctggattcaagcgattctcctgccgcagcctcctgagtagctgggattacaggcacctgccaccacgcccagctgatttttgtatttttagtagaaacagggtttcacacatgttgatcaggctgttctcaaactcctgacctcaagtgatccgctggccttggcctcccaaaatgctggaatgacagtcgtgagccacagtgcccggcccccagtcctatgtcttatcttccttccaggttttggccatatttttgacagaagacactctgatgcctgcattgtccacctcaaggattaaccctgcgttcatcccagattcccctctctttaaatttgaaatcattaaatttggtttattctactctcaatatcttagagatctatatcctcttctccatttccctctcattagtcttgtcattttttagcagatttttgcaagagtttcctagctggtttactttacaactttcacctttctgctatcagaaatatatgtatatgtgggtctgtgtgtgtatgtatatacctatatttatatttttaaatctatttttttcttatgtcacacccatatcttgggttcccttttgcctaaacaagattacatctaaactccttagcatgatgtataacacttgtcatgatctccctcctgaatttcttttcttgcacataccatttgcaaatcaccaatgtcctcccagggataacaagctaattataattttccaaacacactgtgttttgtgtgcaaccactgagttaaaaaatgctgtctgcaggcttagatgagcagggagactaggcaccagtaatactcaggtaaatcaaggttacaaacagtagtcaagctgactagaattcaggcagagagatgaaccactttctccaaggtggatggagatgcaatcttcctggctacaagatcctcatcaaggggttgcacagtagaagatcatgtttgaataaatgaggatcatagcagatcttctggagttctaaccacctttgccaagcctagccttccctacaggagactggggaagttatccttctaagtttagatgtaaacatgtcaggaattacctcccctgggccaagtgccccacataaatcttggagttaagcaaggcagattccagaataataggcatgaacccaaacctcacgtatgactcttttgcaccccaggttaatgctgcttggatcaaaatcatttcagaacttgggtttgtcatcgagtcatctgtggagtcattagatccttaggccaaccagatccttaggccagctatagggaccattctgcaagatgcaagggtcccacctgtgggtctttgcatgtccccttgtctgatctagcctttctctttctgtctctacctggtgaactgctactcatctctcaaaactcagtatggatgttacaacccttgtaaaaatgtctctcccctttctttttttttttcttcctttttttttttttgtggagaacggggtctcgctatattgcccaggcaggtctcgaactcctgggctcaagctgtcctcctgcctctgcctccctgagaatctctgccctttcattgttgtacttccattgttttatatcctcattgtgctgtgtacaccccctcttgcagggcacatcaatatttttgtaattgtcttttgcctgactgtgttatatttatcttcacatcccaaggacatagataatgtctgccacttaacaggtgctcacacatggttttcaaataaatgagtgaaacaaggggtggaagaaacaaaggtaacaaacacaggcagccaaatattcacagcttgcttataagagctcattagggatgttgtagaagtgaatttgttggtaaaaatattcaatttaaaggtcaatttaaagtatacatatgagacaatgactcacagggttgatgctggaaatgaactaggtgtatcactcagtgtcagttaactgctataacaaacaaaccctcaaatctaacgccttgacctcaaagaagtttgattcttgctcatgcaaaacataatgagcatattcttgaatggatggttctgctgcaagcagtgaatcagggactaagctatttctatcttgtgactgtactatcttggaagttcaaggttgccttggtaccagccagctggctctagggatggcaaagagggcatgaaatttcacttaggttcaagggggttaaaaaatgtagtggaaagaaaatgaggcagccgggcgcggtggctcacgcctataatcccagcactttgggaggctgaggcgggtggatcacaatgtcaggagttcaagaccagcctggcccaaatggtgaaaccccgtctctactaaatatacaaaaattagccgggtgtggtggcgggcacctgtaatcccagctactcaggaggctgaggcaggagaatcacttgaacctgggaggtggaggttgcggtgagccgatattgtgtcactgcactccagcctgggtgacagagtaagactctgtctcaaaaaaaagaaagaaagaaaaaatgaggcattctcatgaccactatcccttctgcactggggaatcaaaaaaaaaaaaaaaaaaaaaaagcgagtgtgcatttaaagcaaacagtagctcaatgggaaataatatttgcatctctattttatctaaagtctatttttaaaaggcctataaaatcataaaagtcatgtggcattatttttcaactttgtaaatggttgcttggcactcattcaattagacaggatagtttaacagcagtgatactatcagcatcatcatcaccatcattgtcatcatcatcatgaccacatcttcattgaaggcctcatatgagatataggtcactgcatcaggtaatggagtttcaaggaggcataaagtcttgaggatcttatcaagttgggacgtcagagtaactacattcataaggtaaatcataatgcaagcctgcatgtgcttaatgctaaatgactgacagtgatattatggagaaatgggcatccctgaggtcaatgtgatgtactctcagaaatatgagtattgactacatcagagaatcatagactataaaaaccatgaaggcctttagggatgtaggccacctccttcattttacaggtgagtatggcagcttctttcaaaagatttctcctcccctcctcatcttatgtaagaccttctactgaacctgagctgccccatcacttcttcattacccagagaatgtggcagaaatgatgttgtactggttccacgtttaagagaccaaagcctggcagtctcttagaattcacactttagtggacaggcatgatggctcacacctgtgatcccagcactttgggaggccaaggcaggaggtttacttgaggccaggagttcaagaccagtctggtcaacagcaaaatcccatctctacataaactttttaaacagtatgcaaggtgtagtggcgtggtgatgcatgcctatagtctcagctgcagtgagctatgatcctgctactgcactccagcctgggtgacaatgcaagtccctatcttaaaaaaaaaaaaaaaaaaggcgaaaaagcatttacattctgggggaagctagcatcatgtaagaggtccatcacctctgaaatgaccatgctttgagaaagcccaagctcgtcacacagagagactttatagagagtgggattcctagccagctgttagccattccagttcagatgccaggcatgagagagaagtagcaatctccgatgtgcaactgagtgaatcattcttatgaccccagctaccgcctccacctgattccaagcacacaagagacaccaaatgaaaacttcccagctaagtccagccaactcacagaaacatggttgctttaagccactgagttttggggcagtgtgttacacagcagtagataaccagaacaatgaggaaactgagaccacagaggctgagttcccttagggagtacactattttatgcagagccaggaatagagccacattctgcgattcctaatccagtgtacttgagtccagggcttctcaaatcttagtgggcaccagaaccacttggggaagttgctgaacactcagcttcctggactccaccctcagatattctgattaataggtctgaggtgggagtctgagaatttttatatctaacaagctccaaggtgatgttgatgctgtcagtctgttgactaattttgagtagccctgccttacaccaggcctgagctaatctcccagcacagtttagacaaacgttggcatctgctggtttactattgtgcttcttgacaattacccgtttgctgcatttccaggtaaataattgaaaagcacgaagtgacaggtatttttcaggatgcgcccagttgcagctgagaccagttttagctcttccagctgtaggctgaagaaacccgtatggtctgtaagctagctacccttatcggagttctcctgtctgtaggtatgacagtgagggtttcataaccttgttaccagaagcaattagggtgatcatccagattttcagatccatttcccatagagacacacgttaggaatctcccacagtgaatttaattagtgggaaacacggctcagccagcgacctgcagtgcagataacagccatggctgcccagagatagtggctcccttttcttaaaaaatgacaggtttcctaaaaggtggtgatgagtcccagccagacttcaggtgggaatctctgtgcagcctgatttcatgtaaccaagcaactcacacatcttccttctattcaatttaaagaactcacctaggcagagatgcgagtgagaaaggataacggactgcaaatgacagcattaggcatttccccagtgtacctgggcttattttggccactggtgtatttctgcagatgttctgcatgtgatacagtagtcatatttacttctggaattgttattgaaggttctctaatgagtaatgtaggatatctaatagcccacattaatggcagggaagctgtgaatttgctttagtttatctctgcataaaaagccataggattagtctgcttgcattatgtgctggagtttaaagatgaccttgttaagcattaatgaaagtcgtaggcaaacatttgtcaagcatcagtgggtgaatagacccctcttaggcagaatattcatgccgtccattacaataactattagatacaatgcgaagaattgatcaaatatgctccttgtaatataatcctatatgaggattaatgattatattaagtaccagatggcataatttggcattgactaaagttattggtaaactgagaatgtttcatgtccccagtgtttctggtttagactaattgatgtatgttcaaaatctagctagagcttttacattaatggggccctgtggcttacggcaggggatcatggcactgttacctggacttctgaggagttctttatgaaaggagggagctcttgggtcagttagcgaatgcctcttgtttttaattgtgataccaattcatactaccacaagcggcaatgtttgaagaaactcaccccttaattattcatcgtttccaaggtgaaacagtattatttttctcagtgactctcaccattaaaagtcacagctatttgtttattgacatttatttgatcactactgaaaagatttttttttcttgtgtttatagggcctttgcttctctttctctttttctagtctgtttgtgaatgttaaccaatttttcattgatatttttgctttcctttttattgactggaaagaagttgtatttgcaaaagattgctgagcctgggtccctgagtgacatcagtagcacaaatattgagggtactcaggagtgtcagaagccatgtggccaggcaagttgattatataaagatggttggggagcaaaggtgggtttctgtggaccccacttaagtgtttgcatgggggtggctgggtgggagtaaatgaaaaatatttgtcaaagcaggactagcaagcaactctaaataagttgaagtttttggtaatgtattgctttaatttacattcactttatagtccatgcacatgagaattatttggaagaggtttaattttactagctgctgaatgcagtaaggttgctagcaacagagcagaaagagctaggctgtttgctaatgcacttgggctgtactgtaactacgcaaggcagtgctagtggcggtggagtcaataaacatgcagttctctggctttgagggttatttgttttactgagccaatatgttttttctagttaacatttttctgtagtgttttcgcctgtgtgtgaaaggcttgtaaatacacttgaaggtgctggggaaggaaaaggtattgccaacttcatattggtggattaaattcactgtatctgcttctttccccgtgaaacccaaacatgcggagcttgcatgtcttttgagatatggcagaactgaacttaaaacctgggctttttcgggtgtgaggacccttatctttagtagcccccaaataactcttaaaatggccggaaaatctaatttcttcttattatgacctaccccagttttgtcacatgttttatgtttggagtcacataaatactctggccattttaatcagtgaaaaaactatatttggttaagagtttagtttgttactactgggaaatttgatttatctgttttaagcaaccatctggagtacgtttattcatattacgtgtcatgcatatatttatgctgcaagatcaaaaaaccttaaattacatccttttgaaagtttatatgttatataatgacaattgccaacaccacaacgatgtgattgcatggctttcaaaaatggaaacattgtacaacaaaaagattacaatgtataatgaacaagttcatttgctcaaatataaatgtgtagtgaataatgaaatgcatgcacaatgagctgagatgaatcttctgtcattagaaatgcaattacagtgtattgaaatttccaaagtctaacaaaagtaaatagatatatggttatgcagccaaaaccagattctattcatttgtgaaagttttccttaattatgccataaatatatcaagtaacttatacttaataaggattatgcaaaaatattgataatgtgtatatgtgcacatgtgttatttttttcaatcgaaggagtagtgtttatacaaatctgctctgtgtataatttagtgttcccaggtagcttttagtctcctactattgtcacttgacctcacaccttcatatctttctgagagcaccattgccttcccttatgccttactctctttccagcaaaatcatttcacaggaaaagatctgcagaacacagtcatgcaaaaggatgacctaatggaatgccaagttggcatgcacatagcatggcagatccctcctgacattgtactcataccagcatgaactggaataccaaggttgccacttagtatttgaccttaggtaactactaaaccttcctgagttttcgttttataaaacagaatatccctaacatcttcctctggttttggtgaggattaaatgatgtattttatgtattgcttttgatagagggtgttgttcatgagttaataatataatttcctttcctctgctctaatgttggttcatttcttttgcatattgcaatgttgtcttcttggccaaggtattcatcttctcatgtccctttccctggtatcaaataggatgcttcagctgcaagtaacatagtgtccatcaaagagtagattaaatagtgattatatcacatagcaaccagcctagagataggtggttctagaggtggggcggtggctcaacggtgtcatcaaggatccttctttctgctccccaccttcaccatattggattcttcagctttccttgtggttgcaaaatggctgccactgtttctgacatcatatgtagccatgacaacatccagctgaagaagaatagtgtttcttccttgcatctgttcccaggagcatctgcctcatcccaaaatcatgtgaagtacttaccttaatctatccttaggtagataatacgttgcatgtagctgaaacatcttacctgatccatttcaagaggggcaggctccaaatatttacatttgtccatttattctacatatatttattgaaagcctattatgagtaggtgtcggactaggtgctggaggtttaatggggaacagggaacaagacagttcctgccttcagggagctcatggtcaagtgacagaggcagctttgcacagaccactttactcaattcggtttaattgaattatttcagtcatagttctatagtgtgctagtggtaagcctggggcgtcaagctctgcatggaagggtggttgtcaggaagtttcagtgatgatggctgtaggatttgcaaagttagtgaaggaagaagagggtagaaggtcattccaagttataagataataaattccaccattggcattgtactacatgctttacatatatcatttgtaatcgttacagcagccaggcaaggagggtgacactgcaaggtcctttcctccatttcacagatcaggtatctgaggcatgggaggttaagtggtttttccgaagtcacatagtaaggggaggagttggtatgggaattcaggccagtttgatgtggaatatatggtttttttagctaatcgtcttgtattttcattgaccccagggagcctcctaaatttgaaaatcagggatcaagaaggagacatgggagacacatcactgggttggatagagaagtgctgtcatacgactcagtgttcttttcactacaagctttctgtggacatggtggttctgcaaggcaatagtctatacctccctcactagtgatgctacccctcagagctaagcctgagaagagtgctaaagagataatgcagatcttgcaaatcttatatgaagagtccaagaaacccccccttagtttagaattgtgtggttatttgatcagagtgtgaaccagttcagaacctcatgtactggaaagccctactatatttgaacctcggtttatctcagggatattccattgcatacttatatattttttcattgtgtatcattagtttctccctttaggcaaatcatagatttttgattcagacgttttaaccctagctccacaacttgctgtttttgaattcttaagtttgttaaactttcccaacgtctcagtttccattatttgttaaaagggtcgctatggtttgaatgtgtcccccaaaatgtatgtattggaaacttggttcccaatgcagcagaactgggaaggggtcctttgagaggggtttaagttctgacagcttccaccctcatgagtgtattaatgtcaggtattgtgagagtgagttccttataaaaagacaaattcagccccctcccctctctctctctctctctttctttctctttctctttccctcccactatgtgagcacacagcaacaaggcatcattctggatgcagagagaagcccttcccagtcactgactctgctggtgccttgatcttggacttcccaatctctagaaccatgagccaaataaatgtgtttattataaatgatccagtttgtggtattctgttataaaagcacaaaacaaagacaagggtctattgggaacatattctcagtgttattcatagagtcaatgagctaatataatgttctggcatatccatctaccttaaagccacctgcggattttaaccagggagactggacatttccaagtctattggtttagctagcagtggaagctacacatcagaacggcctgggagaattttcaggactcaccccagacagattaaataagaattctgggggaacactagtgtttttgtaattattcccaggtaactatagtgtgcatcctggaccaagacccaccaagctaggctattgcttctcaaactttaatgagcacacaaatatcctgggtttctggtaaaaactcagattttgcttcagtaggtctggggcaaagcctgagattgcagttctaacaagttccagtaaatgctgattctgttggtccatggaccagacactgagtaccaataagaactaggaagtaagaactagtaagtcttacttcctagttcttagggataggaatatgttttgcctcaaggctgggacagctaaataattttcccaagccctggtggctctctcttttctggaatgaaagctttaggcaagtggactgcattgaaatggactacatatttttcctcatctattttctcatatcacaaagccagcatgggatcatagagaatttagagtttcaggcatggaagatccttaataattgttggatgaactgagattcctgctggatggttgaagatgctgaggtgttactggaggctgctgaggtagcatccctgctgagatgctactggaggctcagatgccataggatgttacaagttatgtcttgaagatgctgtcaacctttagtggagcttaacaacagagggatcacttaggtctctgaagacagtgcatctcaaatttaatatgcataggctgtgggtagagtggggttggggtggcttatttcaacagatccctacccccgagtttctgatcagtaggtttgggtggggtccccaacatttgcattctaactagcttccaggtgatattgctggtctcaatgataccttgggaagaatcctttctcaaagccagcaaggggccaggtgtggtggctcatgcctgtaatcccagcactttgggaggccgaggggggcagatcacgaggtcaggagattgagacaatcctggccaacatggtgaaaccctatctctactaaaaattcaaaaattagctgggtgtgttggtgcatgcttgtaatcccagttactcaggtggctgaggcatgagaatcgcttgaacccaggaggtggaggttgcattgagccaatatcacgccactgcactccagcctggtgacacagcgagactccatcaaaaaaaaaaaaaaaaaaaaaaggccagcaaggaaacatttaacttggaacttccctgtaaaccatatggactgcttcaaagcaaagactctcatgagtcatttctctcctgggaaaaggtacacgggtgaaccagccatggggtcggggatggtttttcccccagtcagcctcaggagtgaaatggagagcagaactgagggtgacactgcacagtattggggtgcaggtgggagccatgaaaggagcttcctgaacatcctttgctatttgaaggagtcggccaggtgacaggacacctgatttccaggcagcaatggtgctaccctctctttggagggctgattaggctactcttaggtacaactactgagccttcctgcatcctggaagatccttttctaggaaggtgggtatatgaaggaggagcatctttccctagaacctccaaagaggctctgtggctgctgtgatgtgaacatctgcagaatcacaacattatcttatcagtaattgaattcagcttgtgcatcagcctcacattaaagacaactcagtcccttctgatttaaaatgtaacctctctgtggtcaatattcagatgattccggcttccaggcatttctttctgagtttaaggccattctacctctctctagaggttcttcctctctatgcttcccagaagggtggctggattcagaagatatacttctgcaatgaaaagggatcaagttatactgatcgtttagacctcactgccttttcctagggggttctaggaaaactcccccacctccattcccatcagctctggttgctggatgtgctctggcatccactgctcatgtctgtgatcctgccatggcttccagttgtgatgtcttcatctgtcttgtctggtggatggtagggtcccagtccattctttgggactttttgtttttaattttaatttatttatttattttgagatggagtcttgttctgttgcccaggctggagtgcacagatgcgatctcagctcattgcagcctccgccttctgggttctagcaattatcctgccacagcctcctgagtagctgggattacaggcgcccaccaccacgcctggctaatttttgtatttttagtagagacaggttttgtcatgttggccaggctggtctcgaactcctgacctcagaggatccacccgcctcagcctcccaaagtgttgggattacaggcgtgagccattatgcctggcctttggggctttttggatctacctgtgctatgggtagcaggaatgaggtaagctgaggtggaagctcctgaccgttttgcctaaacagaacttgcctatcatccatgaggctgtcctacaaactgtggggtctcctagaagattctcctcccagagttccaagcaggaagccgaaagctgggtgtctcctctctgctaacagattctctcaggtcctctctaccagccgcagtccaggaaggctcttttcagtccccatggctcaggaaatgccctgaggtcacaccctgtcctgaatctttcctactcgatggcttttggttagcaaacaaacaaaaatataaatattcctttctctcttttgaacatgctagctaaaaaaatttttttttaatttctggttttgcaaacgaaagcttcagttttcacaactactctttacttcctgaaaccagattccagagacttctttggaattaggaccttagctcggagtcctttgctcttccctgaatttagctccatccccaagcaatggttgcctcagcttcaggggtaggaaagttggcaggagatgacagtggaaagaaatagatatatatgggataaaattcgaaactaccacgccacttcactctccaggcctgtgtgtctgtatagcttctgctctaacacctccacttggcttcctttgcactttcttctcttttcactctcctgcctcctccacctttccttttcttccctaaggtagccctggtagtaggggcaatgggattgagcaagacaaataagtcaaagatatttcatcttgtctcttccaaattcaaagaaatagcattctattttcccctcaattgctgatagtacctaaaagttcctcttttttatattaatttttttcagctaaagcaaaagtgaaaaatcaggagtttacattttctacaaaacatttttcttaatgcggttttagctgtcaagcttgtgagactgttattgtgacttcagtgcagtctatttatgtttaacgctagtgtataatgtagaaaagcgtgcacacgtcgaaaatgactctctggaactcagcatataggtatgtttaaaagctaatacctatatacagccagcaaggaagctctatttcagtgtactaacagccatttctgaatgcatacaggtctgtctgtattgaaaatctttccaccagacagccagaaaaatgcactgcaaatttagaagcaaactataaaaatgcaagcagctggctggagcacagtaaggctcaacagagggacctcatgaaaccaccaatggtaatcgttatttaaagaaactggcttactctaaacagcatattgcgtttggatgttttctaggtggccaaaattgtatggacataacaagatcctagaaattagctttctggtaggtttcagtgtggggattatttatgttgatccattgttttgtatctcccacccagaatgctttttatccaattggctctttttttaaaaaaaaaattagtttttgttgttttattgttgttgtttttgaaacaggatctggctctgtcacttagactacagtgcagtggcacaatcttggctcactgcaacctccgcctactaggctcaagccatcttcccatgttggcctcccatgggcctacaggtgagcaccaccatgcttggctaatttttgtattattattattattattattattattttagtagagacggggctttaccatgtttcccaggctggtctcaaactcctgagcttaagtgatttgaccaccccagcctcccaaagtgctgggatcacaggcatgagctactgcacccagccagtcattgttttgatgagaagcaaaacctctatgttaaccgtgtcttctatgtatttaatgggtactcttcctatgtataaaaaagagtagaatggtcagaggttctgggatgctggtcaagttctagtccttgatctggatagtgattacataggttacattattttaaaattttgatttgtcatttttctctttgtatattctgtttaataaaacagctttctgttcaacaaaacagctttagaaattcagaaaaattgaaacacagctataaaatctttgatatggtttacacgtaagagatcattttataattaacttcaaaggcaggaaatctcagggtaattggtaagtgtattggtacatgaaatatttgagatgaaaggaatttaagagcagtataatccactctcttctctctgctagtgagaaagaggagaaccagagagtcaagggacttattcaagaaattctggctaatgtattgtggaagcagaatttcaatccagtgccacattttctactatgccattcatgtaggaccatgaggaacctgtactgataaaaacaaaagctatcatctattatgtatttattatttattattttttgagacagggtctcgttttatcacccaggctgaaatacaatggcatagtcacgcctgagtgcagcctcggcctcctgggttcaagcgatcctcccaccttggccccctcagtagctgggactacgggcatgcccagctatttttttaaagtttttgtagaggtgggatctccctatgttgctcaggctggtcttgaacttcctaggctgaaatgagcctcccacctttgcttcctaaagtgctgggattataggcgtgaaccaccacacccgccaaaagctataatttattgagcaccaaacactatatatgcatgatctcatctcatccataaaacactcctgttgagagataggattttcattcccatttttcacatcaagaaactgaggcttctccaggtaagtggcttagtcaaagtcgcagagtgagcaagtgtcagagctaggattggaacccacatctccctgattctcgactttaccttcataacgttctcctgtagcgtgttttttttacaattaaaattttgtgtttggattttgtttatttccgtactcaagttttactttttcctttttgtgtgaagcattgaataagtaggaaaaagggcaaggtttttcagggaagtatataaataactagaaaatttgtttccattcatttcttttttgtatacatataaaagatgtatagttctggccgggtgctgtggctcacgcctgtaatctcagcactttgggaggccaaggtgggcggatcacctgaggtcaggagttcgagaccagcctggccaacatggagaaaccatgtctctactaagaaatacaaaaatcagccgggcgtggtggcaggcgcctataatcccagctactcaggaggctgaggcagggagaagtgcttgaacccaggaggcggaggttgtggtaagccgagatcacgccactgaactccagcctgggtgacagtacgagactctgtctcaaaataaaataaaataataaaaaagtatacttctttttctttagatattagagccaacattatatctgcttacgtagggatttcaccaaacttcagtacgtttaaccatgatattaaatcagtgagcacagatgctgctacaaagaacttgttcacgacataaagacctcttctgttcttgaaatagaacttacaagtttctgtagcggagtaaaagtaaactgggagtggcatcccatcttgatgtcatatcctttacgcacatcagtttaggaaagcaagtcctgtgccttgagggtgccagccaccaccctgcatgaagccaggcacttctctccagaattatgagcctcgtccagtgctctgtgaatataggtacttcctgggtgattttgcaaaggccttgtgatgcggtatatactaaatgctggcattactgagctataatggccggaagtaattttctctcagcatcggggaccacagagaacttgttttgcgccggttattagtctacattagaagagaaatttatttgctggaggaaagttattaaaatactctaattcaatatttgtgtgagaaataataaattggtaagttacaggtgaacaagagcagcgaactcttttgtttcttccttctgggacccactgcagatttccagtgtttactgtgttgctgcttcttagatgaatgatttgtctatttgctgtgggattaactacacatgttcttggcaaagaaggcaaaatgcagccaaaagatcttccatcctgctggaatattgccattcatagtgccaccattcatgtgtgtgttttatctccaagtgatcaaagctctgttttgtagaggacggtcttgatttttgatttgtcaacaaaaaataaaatattattattggagctactgatgctgatgcttaccttttccctaactaatctcttcacacaagtagtttaacagtttatcaggaagcctaagataagtacacattaattgtatcttgccttgattttcgcaatgaaatgcaccataattttctcatagtcctttgagagtctttctagtgtgttgttttcttttctgcttttttgcccctaaagaaattctccaatgtgcaaatttcttttctttgggctgtacatgttctccttcagtgatctcattggctgtctagcccagtgcctctcaaacttcagtgcatgtggaatcacctggagactctgttaaaattcagattgtgggcttcatttcagagactctgattcagtgggtctgggatagagctgaaaaagtgaatttctcatattcttccagatgatgctactggtcagtggcagcatgtggagtggcactgctctaacccagatgatcattactaggtaaataatatcaacttataggtctttctccagagtttcaaactgatgatttattttttattttgttttttaaacattttatttttattttgttatttaaacatttattttaggtttcaggggtacatgtgtaggtttgttatataggtaaactcatgtcatgggagtttgatgtataggttattttgtcacccaggtactaagcctagtacccagtagttatttttctctgctcctctccctccaccctctttaggccccagtctctattgttcccttctatgtgcccatgtgttctcattatttagctcccacttataagtgagaacatgcgatatttggttttctgttccgagattagtttgctaaggataatggcctccagctccattcctgctcctacaaaggatattatgtctttttttttatggctgcatagtattctgtggtgtatatgtaccacgttttctttatccaatctacaattgatgggcatttaggttgattccatgtctttgctattgtgaatagtgctgcagtgaacatacgtgtgcatatgtctttatggtagaatgatttatattcctttgggtatatacccagtaatgggattgctaggtcaaatggtggttgtttttagctctttgagaaattgccactctgcttttcacaatgcttgaactaatttatactcccaccaatagtgtataagcattcccttttctccacaaccttgctagcatctgttatttttttgactttttaataatagccattctttctgactggtgtgagatggtatctcattgtggttttgatttgcatttctctaatcatcagcgatgttgagctttttttcatatacttgttgattgcatgtatgtcgtcttttgaaaagtgtctgttcatgtcctttgcccactttttaatggggttgttttttcttgttaatttgtttgttagagatgctggatattagacctttgtcaaatgtgtagtttgcaaatattttctcccattctgtagattgtctgttgatagtttcttttgctgtgcagaaggtctttggtttaattagttcccatttattaatgtttgctttgttgcaattgcttttaaaactaatattttaaactccctagagggctgtatgggctgacctgtcagggtctcataagtaagatggcccttatcattaccatccagtgattgctttcctgtgcttactaacagtgcctcctttatcccaggtatccaaacttgagacttcaaagtctacttgcccaactctcttattcttttgcttttgctctgttgggtaccaaatccagcagaacccaccatatcaatgaccgccatagatactccactgccacaaacactcctgtagctctggaagtcttctcccatgttttctgtttatagggaccaaggaaaaaatctcctctttactctctgaagttttactaaaaatcaatgcacaagaggcagattaacaggagaaaaggcatacaacatttattaatatgcacacctgtacacaagagtcatagaaaatatgaaaactcaaagaaagttcaagatggttgatgctttcatatcatcgtgaggttacagaaagaacagaggcttggggaatggcaaggcagtttatgggaaagagagaaaaaggcatcaggcaaaggtggtcacaggtagcagctctcagaaagaataaatggtagcctgtggttggttaattttttctacatccagataaaggtaagggcctcagagaaaagcctggctatttatttcactaatgtagatttttctttttttgagatggagtcttgctctgtcacccaggctggagtgcagtcgtgagatctcagctcactgcaatctccgcctcccaggttcaagtgattctcctgtctcagcttcctgagtagctgggactacaggcacacaccaccacactggattctttttgtatttttagtagagacagggtttcaccatattggtatggctggtctcgaactcctgacctcaggtgatccacccaccttggccttccaaagtgctggggttacaggaatgagccactgtgcctggccgatttttctttatagttgaaaatctcctccataaaaggcagtttttcagggctattcctgtctgcaggccctctgaatagccatcccaaaatatgtcaaagaagtgtatttttgggtgaaacatttttggtttccttcatctacttatactccctgatttagctacaactacaccaagcactaaaatagctttgtgtctttaaaggtgccgcttcctcagcctgtaacaactgtttgcttctttttcactgtgatatggctacaaacttatggggtcatgcagggatggagagcaggttatattatttttagagatctgacaattctgatttataaagaaaaccttaaataatctagttcaatttagataggaaattcctggggtaagttggggtaaggatatatgtcttcctttatttcctcggctctatccaacggcttgtgggatccatttgcctccatattgactgaatacaaatggaaccacaacctacttagaaatactggtctttcttatattgtatgtcttccctcacactcccccacatcccctcttctcgaggaataaactattctcaataattatgatcactctatttttcatgtaaaatttttggctgtaagtctaataggaagcctgagacattttggggacatttatttagttaatgaggacatatgtcagagtacctgaaatggaaactgacccatacaaccaacagtcataaatattttagattttcaaagtgttttttttttttttgcgtgacagatttttgaagtttgctgaaagcctttcaaaagtatattacccatttctatgcgttattaaacaaagattgccagctaaccctgtcttttcttgatgattcacaaccataatcgcaaatgtcactttttatgtcatgcagtgtttttccctttgatctccaatttccagttatggctttattggtgactggctagtctcctgaagctctcctgcctttaataatgtgttgattttaatctgcggggagctggcaagatagataaccaaggacgtatcaaaaatatgcaaaagatgtcaataggctgagagtggtgaactgagggctcatctattaaactggcatttgtgctttgccacagccatttcaacaacccagagtgccttttttttttttttttaacacgggttctttctctgtcacccaggctggagtgcagtggtggtatcctactgcggtggcgggatcctggctcaccgtagcctcaacctcctgagctcaggtcatcctccaacctcagcctcctgggtagctgtgactacaggcagatgccaacaggcccagctaattttttttttttttttgagatatgtggtttcaccaatttgcccaggttagttttaagctcctgggctcaagcaatccactagcctaggctccccaaattgttgggattacagacatgagccaccacactcagcctgactttctaaaaattatttctttctctttctctttctttcctcccctcctcttccctcccctcctaagccctcccctcccctcctcacccctcccctcccttccccttccctcctcaccccttccctcctcaccccttccctcctcaccccttccctcctcacccctcccctcctcacccctcccctcctctcccctcccctcctgccccctcccctcccctcctctcccctcctgccccctctcctcccctcctgccccctcccctcctctcccctcctctcccctcctgccccctcccctcccctcccctcccctcccgtcctctcccctcctctcctttttttttttttttgtaaagtaactttggattgctcagctatgtctgctgttttctagacagttgtttccccgtgaaggcctgaccttcagatgaatggagtgcaactctgttacattttcactatttcattaatgtaattcgtctccctttctgagacatacatttaaatccaaggggaggatgctcactggagtttaattgccatcgtttaatatctctggaatgaaaattctggcagtgaagaattcaaagcctccattttagactttggtcacatttgtatatattttgtttcttgcaaaaagttcaaattttaaatcgttttgcatcatgtggatttagagtacatggtatagagatggcctttacactggttgaataaaccatgttaattacagaagattttaaatttaattgggaaggagaaaagagaggtattataatattggaataaacctgtagcatttactaccaatctctactgctgtttacattttatattgacaaacttaacttgctgaaggctaaaaattgatttgtcctgccccatttccattatagttaaagtcattatgtgaaacaacagaagcttttataaaggggggaacttgtgtctatctttacaattaactaggaaactggcattaaagaatatcagtctactggctctctagtgtagagaacctaattgctaaaaatgtgctattccaaaatggcaagtcccaaccactttgttaacattttctgtgctttgacagttaggttagattgcatatcctttgcactatgaaatgttaagtatgactctagactctttcttttagataatcagttgatacatgtcaattgaacaaagtactatggaatattaaattataagaaagatacggtctgtctccatgaaggcctgctatttagctagagacaagatatttgagtaaaataaatggtgaaggcaggtgttgtgcataaagatagcatataaggacttctttaagggctaaattgcttgagtagatgttacatgaagaaatgggtgaaggagatcaatgtgggctggagttggggagaaggtttccaggagaaaataggtctcaattttgactttgagtgctttgtagaaaggagtagagcattaaggctgagacagttcactagggtcctgcttaagatggaggttatctggtgttcatgaagtcagaagaagggttagtagaaaaagacctttaagatgctgaagaatggtagtgctacaacaatccctgtgctttgtaaagacagaagttagaatgtgcataagtgattaacattgctgtggaggaggactgcctcttcctgagagccagtgggaaagaagaaaggataggtacagagaaatgttgagggaacttctgatggatggttagagacctttcaggaaagcagattttcttaggttgtgttcctagaagttgagcctactatgaagattccagtacaagttagtcattgaagaagagcttcaggagaaagaggagtgaggctggatagggtaagaaagaagagagcaaataaaaggccttccaataatgttgagcctccacctgaccctatgtggagctctggagtatgaatggcaccagagggttgttctgccttgagaaaaatgggccaggtatttgcatttgcaccctgtttccattagtgattacccagctgcaacctcccaggtgcagtcatgtaccacataaggaggtttgggtcaacagtggacagtgagctgagaaattgacgttgcctggtgactttgcagccctcatagtgcaacgcattactcacgtgtttgcagtgatgtacccaaacctactgcagtgccaattgtgcataagagtctagaaatacaattatgtatattacatagtacttgataatggtgataaattactatgttactggtttctgtatttactatactatactttttatcattattttagagtgtactccttctacttatgataaaaagttaactgtaaaatagcctcagccagatccttcaagaggtattctagaagccatagttatcaaggagatgacagctccatgcatgcattgcccctaaagacctcccagtggacaaaataaacatactgatagtgccgactctgtgtaagcctaggctaatgtgtgctttgtgtcttagtttttaacaaaaatgtttaaaaagtaaaaatattaaaaataaaaatattaaatgtagaggaagccttatagaatagggacataaaggaataaaatatttttgtatatttgtacaatgtgtttacattttaagctaagcattattacaagagtcaaaaagctaaaacaattaaaaagtttataagataaaaaaattatagtaagctgagtttattattgaagaaagaatatttttaataaatatatagactgtgtaaaatgtttataaagttcacagtagtgtacaggaaatgtcctaggccttcacattcacttaccactcactcactgactcactcaaagcaactcccagccctgaaagattcattcatggtgactggcctatacagatgtaccctttttcaatcttttatactgtatttttactgtaccttttctatgtttagatatgcaaatatttaccattgtgctacaattgcctacagtgtccagtatagtaacaagctgtacaggcttgtatttcaggagcaataggctatgccatatagcctaggtgtgtagcaggccatggcatctaggtttgtgtaagtgcactctgtgatgttcacacaatgatgaaatcactcaacagtgcatttttcagaaagtgtcctgttcattaagcgatgtgtgactgtatttccaggcaggtggcttctgtctgatgaaggtaagtcattggcaaagagggcaggtgtgaaccattggcagccaacagttacagcagcctggggagggatacacttgtccaggaaagagaatctgagtgcaccaaggaatctactggacagaccttcttactatctctcaaaaaaatactttttagaaaatccctcttctccctattttgccactgtgtccaagagcaattctctgacatatacttaaatagaaagtaaaaacagcataatatcttaaactgcccccaaccccaaccatgatctactgctcatatcccttttgtgccaggttttgacaaagtcacagccgaaactaagtagcaaaagggcttatatcggccagcaaccaaaaggaaggtagagggaccctcaggggacaagctctctcatccaccccataagtcatagccttgcagattggcttttgagtcagaaatcactatcttatttcctagagaaactgatgggcaattagggaattgttttgcatgcaggaagacagattcatcttgttcttctcagtgatgtgtatgtaaaagcaaacataccttactatcgtctacacctaagacaacaaatgccccacttacctagaattttaatacttggaggagtcgggggaatttctagtccaggaggtttttcactctggccgcacataagaatcacctgggaaacttaaacagaataaaacagtacccaggtggttaaatagaatcttggggtagggaggaaatggggcaggcattaatatatttaaaaactcctaggatgttgtgatgtacagccaggatttactctgtatcggttaactgttgttatgcaaaaaaatcacccaaatctcagtggattaaaacacaggcatttattattactcatgaggctgaaggtcagctggatagtgtttcaggtctgggctgggcttactcatgcatctgagttcagctgtagattagatagatggatggtcagcgtggactggagagatcttggctaggttctcacagctggttgctaattgatctaggtgagatactagatctggagagactctgcttcatgggatctctcaacctccaggttagcccagcatgaggttccaagagatagaagtacacaacgtctcttaagtcctaggcttagaactggcgtcttcacttccatcatattttgttgatcagagcaagtcaaaaggctagcccagagtcagagaaggaagagacgccaaagtcagagggccaatggcattgctagagggaggccaataattaaggccaacggtgcaatcaatggatcacttaaacctaaccattaactttatggttatcaaaagtgattaatttaaaatgtagacatttcattcacaactcagttcattgtctccccacactgctccatacacactcctccattatgggaaatacttaaaatttgacctatagccatggcatggacaccagtatatagactatgtaaatatctgtatctttaaaagtctaattcacttttattatgtttgtgctctggtctcaatgtacggagagtagatccacagatagacaaagtgaaagtagacacttaaaatttattttctgaagtattaactatagagtgttaatgtgaaatattaacaggtggagtatgtcctgggaacgtgattatgcatgtttactctctcatatttgacaacccatatgagaagagccttactgtatttcagtgggtttgctcacctgaagaggcattgctctgaggaggatggaaggataaggggtgagtgttccctagaatgtcttcaatctgcacataaacacgtcgaaagagagtttacagcaaccatccactttcccactatttctcaaagtaaatattatattaaagatgttgttttggccaggtgcggtggctcacgcctgtaatcccagcactttgggacgccaaggcgggtggaacacgaggtcaggagttcaagaccagcctggccaagatgctgaaaccctgtctctactaaaaaatacaaaaattagctgggcgtggtggtgggcacctgtaattccagctactcaggaggctgaggcagagaattgcttgaacctgggaggcagaagttgcagtgagccgagatcacatcactgcactccagcctgggcgacagagctagactccatctcaaaacaacaacaataacaacaacaaaaagatgtttttccataaatgatgcctctaccatctgaccctatttctcctacataaggcccacagagggcctaaactctggcttgactggggttgtcatgcctggcccttcatatgtgctctcgtgttcctccctcttactccaccctctgaggatgatctcctctcctctctgatttttcaagtcctactgtatcctcatgaaaatgatcaaatgtttttgggtctccggagactattttggccacattaacccttctgtgtgctgaacaactgcataatgtatctgaccctgttgacaccattctgttggaaacagttgcctggcttttctttagatatgtaaagttgcctcgtctgctgggcctgtgagtgtggcggcttgagccagtttcgctattttgagtgttcacctattgctggacacagttactatagggtcagctccatgaggccaggggattcatctgctttcctcactactgtatctgcagcatgtcgcccatagaagatgctccataacctctataactatttaatatattggcatttcagcaataagaaagaacaaacaatttaatatttcaagggtgtttggaatccaccatatgtacatttatctatttaaaattagccctgttatgcagaaggcaatttgctagacattgggaagttaagagaaagcaagacatagtcctaccatcaaatgcctaaggcttgtttgggaagtccgctaccgtcattactgagtgacttctccacgccaggtgctgacgttggtgatgtgagtaactggctcatgctatcagcaactgcagtaaacagtgttaaaagcccccggtcctaggacataacctgtgtgattattggcccccagacagctgagggtcttgggtaagttatataaccattctgaggcttagtgtcctcatctataaaatgagaagacctcaagggaaccctctagtttttactttctctgactgcattctcttaagaaaggcttagcatctctctgatgaaatcacatgacttcaattctaggaaaacaaacccaaaacctgaaagcaagccattattctatttgtccagcattcctttcagagcctgaacgaccctctttcatgtcaacgcacttgagaatgttgaggtttcaaggctactctacatgacatttaccagaaacgatattcagcacattgccaccctatctatgatctggagtttgttaaaacaaaacaacaaaacaagaacagaagtgtttattacttcctaactggcttagtctaaaggatatttcatcaaatcctgttgctaatccacctacccaaatgttctctttaaatctgcccagggacacaatgtaacatttggaaatgtatcactgtttgtagttccctcaaagtgaaaaactgagtggtgaaatacttgttctgggtaatgctagacctccatcccaaacccctggagttgtccccaggggcaattggacatgaccctaaccttctgtgactctgaggagcagggaagagcacagcagcccgttcacctctagactcaccgtcaatgccatcattgctggggttccccttgccctcttatctggaggctatccagttttatgaactcccaaaatgaacacctttataaacttagctccaagtgggggggctgatactgcacctcacatggatgtgttaacctgtttaaaaccttggcaatgatggattcttttaatgttcatctttctgagcctctcagcattgaaaaacactttgtttctgggactgcatttgcctgtcctcccacacaatgaagcaaatgtctctgtgacagatgggccatgctgtagtccttaaaagtcagcaaactagaggcttctcaagccacagggaaattgaagtccaaagcctacacggaaagccccctttctctcaccccatttgggcattcacaggtctacagtggctgaaacgtaaataggcaggatgctgagaaatctccgtaacccaggtagccagcgtgctcttgggatccttagtgcttactgtagaggaaaatattagttttgtgacagggaaagggctggtcagatcggtgtgtgagtttgtcaccgtgagtacaaaatggtgctcatgggaggtagaaggaagactccctctattggaaaaaacttctgcccaagggtgtttaaggacttgttgcccctggatgctgccctcttaatgatgcccaggacctggagttgagcagcatttaactgttggtctagtgactttgccattagagtgaaagccaaagtatttctgatggcctgtaaagccctccaggatctggccttctcctctcctcccactgtctcttaacctagctccttctagccacagcatcttctttgcttgttttaattacctagtgctatgaccacccccaagacatggtggtttaaaacaacagcaatcatttattttgctcacaactctgccatttgatcagaggtccctcattgctgctgtacatggtgtcagctgaggggactcaactggaggctggaggatctgcttaagagttggctcattcacatggcggcaggctgtgagccggaggctcagcccaatccctctccatgtggcctctgtgcagcctaggcttcctcacagcatggaggctgtgtcccaaaggtgagtcttccaagaaagagattcgcacacaagctctactgcctttgacaacctagcctggaagtcacatagcatcccttctgtcatacttgccattctctaccagtctgggcaatcccaaaggcctatccaggttccaggacaggggacatggacttcacctcttgatggggtgggggatggcaaggctctaaaggtcacatgggatggaaaatgtggtggctattttaggaatgtaaaacctgtggctgcagctcttacctcagacatgtttcctgccagtgcttcctctttgtctagggttgcatgtgactcactcctcatttcctttacatctttacccaaatattttcttctctgcaaggtcttccctggacaaaaactaaaacccattctgcttcctaacccctttcagcactatctacatattgtacattttactcatttattctggtttttactgtgtcctccatgaaattacaaatttccatgaaggtaagggcttttgtctgttttattcattgcttatttatttatttttgagatggagttttgtccttttgcccaggctggagtgcaatagcacgatctcagctgactacaacctccgcctcccgggttcaagtaattctcctgcctcagcttccagagtagctggattacaggcacccgccaccacgcccagctaatttttgtatttttagtagagatggggtttcaccatgttggccaggctggtcttgaactcctgatctcaggtgatctgccctccttggcctcccaaagtgctgggattacaggcttgagccaccgcgcctggcctgttcattgcccttttcccagagccaggagagtgtctggcacatactgggggctcaatcaatacttgcctcagtgagttaatgaacttctgccctcataagacaagaaacagtagcggccattttccacattttctttggtccttgggtgcctaccacactgccaggtacgtagaccctataagattatttaattagtgattcactaaatatagcagtttgaaacgacagcaatcatttctcaatctgaaaaaataataggccagcagcgttccattcacagtcacttattcgtaatgcatccccctgccccatctacaaagttacagtgctagccaatacggacactattaaattctgctctagaagtgcttctcctgcttctgattagagccaggaagttagaagaacagacagaagaaaatcacacaggatgcccaggagacaagacacaattctggcagcaaacctgtgggtgtccgcttgatgttcctgccattgtctattgtctgaaggggttgacctgtaagtcaatgggaaggtggctttcccccagtctggttcaatgttcacaattccagtaataaatatcttggaaaatgggaagaaagcaggaagacaattacttcaaatattattgtgcaatcgatggggtaattttgctctccttgaggaacgacctttcttatttcagcatcgttctttaaacagggagtcaccaccttgtgcttgttagcacattctccgaaggtgtttggagtacagtagtgacatttcaaaatggattaatcaaggatgctctaaattggaggtgttcttgaatttcatttaaatatgatttactaaagaacccaagttggaatcaggctggaatgccctgggtgccatcatcatcctagtctgttctgagatggacttatgatgacatttcaacgtatttagcatttgacaaagtttttccccagcaaaagtaaagggaaataagaaccacggccttgccaaacagctttaacttggtgtacacggttacaggagcgacccggatgtactccttgcgtcaatttagcatgcagagtcaccatcacgctcctctacaagggcactgaatctgggactgcctggagacaggcagagtgtggccatttctccatgtctagggagtgtacggggcaaaggagatcctaaggccctgcctgggttgcttcctcctcaagcagaggttacaagaatgaagggacttggcatgctttcaagttcatccaagactatgtaaaaagaatataaaccattaatgtaatttatgggcagaagcactttgaatataaatgaagcaaccaatggcccttttgattggcatttatatctccttttatagagatcacatagagtagtgttataattcttgacagttttgattgtaaaatatatgggactttaagctccctggaagaaagcagagatgattaatattaataatagctaagtacacaacagatatgagtaatatgttttatatttatatatatctattgttttaactcattggaaaacactatatgctttattattaggaatgtagtaataataagactatgttatctaggtcacataaaagaagatgttcaagctaatctctaaatcctattaatttctttacttacattaaaaaaaaaatagtcaattggctctactattcaaactaatgtattcaaaacaatgtgccttattaaaggtatagatcaaaattcaaataacttggttcaaatacagtcagtcccagagtcattcggaagtgtcaaggaagaatgcagagctctaaaaaaaaaaaaataaaatataagagatcaagaaaatcaaagtatattcatattagagcagttagggtttttttttttctatatgcaggatgctgagtgaagcaactctgggctctgtcagcaaaaatacggttttaataagagtgtatattgttatgggggaagctatttcaatagaaaatgtacatatcttagattatctctagcacttggaaaattgcaaaatgttttatcacctctattttccacttcctcctctcttgccatgactccatccattgccatgtggaataaggtataaagggaaaacaaaaaagcttggacattgtgatcagctgaatttaaggtttgccttaaaatcaaaatagagcaaatcaataagtaaatttcatatgtatcgagtcttcattcaaaaggcattttgaatgctttaaagaaaaatataataggttacaggtgagaaagcagtgaaatgtgggtaaatatttgtataatatgtggaaaatgtgaccaaaaaatgaccagtatacatactgtattctggaaaatcccatgcacttgttagaggtgaaacataaattgcaataggagtttctctaaaccaaacagcttgtgaaaacataaatagttctgtagtttacagaaccttaactgctcttctcaaaaaatatacctattcgattttctaagatttgaaagaaacttttgctctcattttattttgtatttttgttgtttattgcatcttcattcccccatgggcttttaaaataagattctgatgatggagaaagaaatgaatgctgctcctatcccctctgcaatttgctgtggtttggaaagcccattctgtatgaggaggtgttataacttcccactgtaccatatgcttctgacttcgtataccttatttttagtgatacatccattagcttttgcttcataaactatcccaaaacgtaatagctgaaaccaacaatcatttatttgctcatcctttcatgggctggactaaaccaggtcattcttcagcttgtcttgcccaagctcactcatggagctgctgcctccctggcagcttagccagagctggaggggctcagatgacctcactcacaggcctggtggtttgcagataaaaggctcggggctttggttttctccatttagctccttcagcaggcaagcttgagctccttcaaattgtctcagacttccagcacacagaaaaatgtgcaagcacatttcaagcctcttctctcatttgctgctgaagttgtgtcagccaaagcaaatgttatttccaaacactgattcaaggatgaaggagaaagactttacttttataggcaggacaaagaatttgtggccatttttttttttcattctactacaagttcaattttcctgccgctgctggagagaaggaaccaccttccccttgtttacatggttgcttgaataacagaatagtagctgctatttttttgcataaaatcatgtgtcttatggggagagaaactatgcagactgtgagatgctgtttcggaagaagagggattcacctctccagctgatatggcaggaaataagaaaccatatgatctaagaggtgctgggagagtaaaaaaaaaaaaaaaaaaaaaaaaggtagaaatgagtagaaatgatgcaggtggaaattgtgtgtgaatgcatggaaatgcatgtgaagtgagagatgaataaatttgtatttcagtcttaactagttttgtttttgtttttttttatggcaaaggaaataatttttgaacaattacaaatagacttttataaattattttcctaggtccacagcaggttgtggggtaagttagagtaaaaattaaatatgtattatcctaaggtattctttctctggcaggacctttcaaagtgccttcttttatttctggcagtcccctggctgcaactcaaacgttctcaccatcacagtcttctttgctagcatgtggtgactaccattttccctgcgtcagttccctgcagagatgtcagctgctcgggccgctgatgctggccaaagccctttgaagattctgggggtactcaggtgctgatgcaggctttgtctcccaccagtgatgaaagtgctggctgcattgttgtgggatcagcaggtgcccccttgtgttcttatagccttgtaaaggtttttccgtaatagccacctatcgattatgttggctcttgcatttttttctttgactcagttgcatgacttcttttgcagtcattttttagttttttgtccaaatagagctgtggggggcctacttcgcaggtccttaatataaactttgtatcagttacctatggccatgaaatgtggtgtgacaatcttataaccgcatgagttcttctggctgctgggggactgtggctcacaagtctatctgtggtcagctgtgggtacttaggcagctttgtggcatctctagggaatgtagcttaagagaactggctccactccatgtctcatcgttgagcaggctaggctgggattgctctcatgcctgtgacggggttccaagagagagggaagtgcttaaagcctcttgaggcctaggcccagaatctccacaatgtcacttctgtagttcagagaaagtcaccaggccatcccagattgaaaagaggggggaatagactatctcttaatgagagaaactacaaagccacatcaaagaggacatagaggtagataaggatagagaattagggccagctttgcaatcaatctaactaccacgcacctaaacacctctgagtcctggggtgagcacagtttggcaacctggacaactctagatgcatgttagaaagattaatttggtaatccttctaaaaggtggatgataaattgactccagttgtaacaggggaggttggtgcaaccagcaaagtggcttttgccttaatacaagtgataaatcaggagggtctgggatagggatagcaaataagttgcacattgtgtgatggatttgtagtaaatgcctagagtggggtgttgaggagaattatgtggctactttcctggtgagctgaacacaggccctgatggattggctatgttcgccatggccattgaagggaggagtgatagcatgccagcaagtatttgccatctctgtcctatcaagggcagtgatagtcctacaaaggccagtggcagtttcaaagagtcttttgaaaataatcaggaggtaaaactagacaatattggtgactaagtacaaatgaagggaaactataagtctaggagagtcttagatattggactgggtactaggtgaatgtcatttcttaaagtgggtcaaggcatgagtctgtattatatacatcagtattgtactgtatcatactatataaggagtacattttttttctgtcatctactgatgcataacaaaccaccaaagaggttagaagctaagatggttagtcttatgtgtcaacttgactgggccatggggtgcccagatatttggtcaaacattattctaggtgtttctgtgagggtatttttagatgagattcacatttaaatcagcaggctgagtaaagcagattgctctccctaatgtggttgggcctcatccaatcagctgaaggcccaaatagaacaaaaggctaacactcccccaagtaaaagagaatttctactgcctgagagtctttgaactgaatcatcaacttttttctgccttcaaattcagactgaaacagtggctattcctgggtcttgggcctgctagccttcagactggagcttataccatcagttctacctaatctgttctgctgattctcaggccttgggactcagatcagaactacaccattgcctttcttgtgtctccagcttgccgggtcaccctggagaccttgagctatctcagtctccataatcacatgagccaattccttataataagtctctttctgtatttatatacttcctattggttctgtttctttgcagaaccctgactaataccgatgcttaaaataactattctacttctcatcattttgtagcccaggcatttggacagggtagagtgaagatgtgctgtatcctctggggccaccaggcttctgcccatggcctcgccctttcgtcgtggtcccatcacacagaagtctagtctgagcttatttatagtttgggagcagtctccaggagcaagcattccaagaggacaagctcttgttaagcctcaatttctatcacatttgataatgcccattggccaaagcaagtcccatggccaagggcacagtcagtgtgagaggggactacacaagggtgtggatgcctggagatgtagatcactggggccatcaaagtaaaagttattactaagaagagtttgatgagtttcatcttaagcatattgactctgatgtgtctatatgggaacaaagtaggaaaagccaaatgacaatatgggtctgaggctaagaaaagatgtttgagttgaatagatacattgggaaatcatgaatataaagacggggtaatacaaaaatatttaacaatcagcacaacatagacactgaccaatcagaacagatgctggctataaccttgaaccagggccccagaggacccctgttaagccaggcatcttccctttagatactcggtcattgagagatgtcaggagtctcaggaaaggggcagggcagttagggcactgggagggctctgatggaaggaagacaatgggcaacagctacttactcatgagtaggaaacatggcagtattttaacaacccatctgagtatcagcccatcgtacaggcagtagctacagccatgggtggtgtggttaacaattaatgggatagggcattaggttaaaccatatgatatgaccaacatttaaccacttttggcctatgcaaaacataattttgcatgcttcaacctaatccacaatgagacaaacataagcctaagatggacaccaaaatgtaactaacaggcaagtgaccaagaggatcccccaaaggaaaatgaaaggaatggctcaatggaagttaaatgaagaacagcacacgtgagggagggagtgggcaaatgtcttgaacatgacagagctccaggaagatgaggactgtgtcttttgttatttggcaagaggaggctgttgatgaccttggcaagttcagattcaaggaaatggtcagggcagaagccgtttcagagtcttatgaggcacctgggatgtgaaaacttgacaaagatgggtttagaataatatttcaggaagctttgcctgacagtgagaagagagacggtaatttattgggaagtagggttaggggagcatcctgtctttaaagatgagaaaggtttgttcacttgtatatgagaaatggaaagaatactgaacgagcttcagttggatgttgtaaaatatgttaaaaaggtaagctggtgggtgagaagagtgaagtctaagggctgggagccctgcattcttgtctcagtctagagggccagtggcaaatttttcttcatgaacagtgattctcatcctgactgcatagttcctggggaactttaaaaattctccatgctcaagtctcactgcagactgattacatggaaatctctggggatgcacccaggcctctcagggcccttttaaagctcctgccttattgcagcgtgcatccaagattgaaaaccactgctgtagaatgtacataatttatcacctattgcttcagctttggggcttcagccaaaattctgacatggtggataaagccctactcaacattcacttaagctaccatcagtgccagtggctttccttgatgacagtggctgctgcagaccttctcccaggctagtggttcttaaccctagctgtgtattagaatatctggggcacttacaaaatactgatgtctgggcttcaccctagaaactctgatataattgttcaggggtggtgttatggctgaattgtgtccccccaaaagatatgttgaagtcctggctgggtatggtgactcacgcctgtaatcccagcacatttgagaggtccaggcaggaggattgcttgaggccaggagtttgagaccagcctgggcaacacagtgagacatcatctccacaaaaaataaaaatattagctaggcatggtggcacatgtccgtggtcagagctacatgggaggctgaggctgcagtgagctgtgttcatgccactacactccagcctgggtgacagattgagaccctgactcaaaaaaaaaaaaaaaaaaacaaaaaaaagatatgttgaagtcctaagccttaatacccccagaatgttattttatttggaaatagcatctttataaaggaatcaagctaaaatgaaatcatgagagtagatcctaatccagtatgactagtgcccttattaaaagtgaacatttgaacacagacgcagacatgcacagaaggaaggcaatgtggagagacacggggagaacaccatgtaaaaattagattggcattatgccatcacaatccaaggaatgcctggagctaccagaagtcaaaatagacaaagaaagttctgctacaggtttaagagggagcattcaacatcttgattttagatgtctagcctccaggactgtgaaacaagaaatttctgttgttctaagccacctagtttgtggtagtttgctgtatcagccctaggaaattaatataggtgggcttggacactgatggttttaaaagttatccagatgattacagtgtgcaactggcattgattttcataatgattaaggaaattaagtatatagcaggcataacctaagtagaaaataatgtcaaaatcagtttcagagccatgcaaacataattatcagaagtataatatttaaaactcagtaacatgctgagtcgttttaatacatggttatatatttcttcttaacttggggctttgcattagcagagaggcatttgctatcttgcccctctgtaatttcttgcttggatgctcattgttagtataatttctcaccttgagtgatgagattctggatttccacttcatgggtgctttatagttctcctcatggtgtatcctttctttttcatacctaagggcactgtcttgcccttatccctattggactttgtccttttcatttataatgttacagttctccaatctgtcaaagttacttagaattctgatcttgcagtccaacattctaatttctgtcactctaggagagtccccaggacaattgaattaagaattatatgaactacaggaggaatcaatttggagaacatcagataatggaaggtttattatattgtgtactgcattaaagtgtaaagatgtataaaagataaatggtcaatgcatgaattatacaaagagttccttaaatgaaattgttggatcagtccttgcccaggcacagtgtgagatgtagaatcctgtcactgtcactcaaagtgtggtccacagaccagaagtcttgcatcagccaggagctgattagaaatgcagaatctcagacttcacctcatatctaccattatgggctaaattgtgtccctatagcccctagatttatatgttacagtatgttgaaatgtgaccatatttggagataagaaatttcaacagataattaagtgaaaattagctcccgaggggtgggtaatgcagtatgactgctgtcctaatcaaagaagaagtttgtagacagatgtatacatgcacaaaggaacgaccatgtgaagacagagggtggagagggccttctacaagccaaggagagaggcctaagaaaaaatcagctctgccaacaccttaacttgagatgttcagcctccaaaactgtgagaaaataaatttctgttgtttaagcttcccagtctttggcaaccccagaagattagtacacctaccaaattagaatctgcatttttagtaagacccatagttgactcacatatataagaaagttttagaggcactagtccagaatactggttctcaacctttagcgtgcatcatagttaccttaataacttgttaaaatacagattgctgggccccaccacccccagagattctgattcagtgggtgtgggatgagaccagaaaagtctgcatttccaacaagctacctggcaacgttggtgctggtggcctgcaacccacacaagtgttacagttgggaccagaaaattaccagcctcacctggttattattagaaaagtaactatggaggcctcagcctagaattcctgaattagagactcaggggcagggcccagcaaggtaattctcaagctttagtttgagaactggtgcttgatagttcaactaaatctgggaaaaggaaccatgagtaatttaaaatactcgctgcccacaggtgatcatttgatgtttttctagacagcatgttctcaccctttcagctaaaaattgccagaaaacgattctggggcagtagtgttacaggatctttggggtgtagtttttctggccagaaacatgtgtggcctgtgtgcctttgctcaagttttgctcaggcccactcgttttgctctctcaggctgctcttggctcacgctaccagcctgggtcccatgcctgccaagggtgagtcaggcatggaatggcgaggggtgtgtgagtgagcatggggtctggccactgtgcacagttacatatacaggctgctgcagcaggtcaggaaactccaggtgccaacacaggtgccagctctctgcaaggcttcagctggaccaggcacatcacaagtaacttgtatggctgacaccagggaacacggtggcacccagaaacttggagatgccagggactgcagggccccaaagagggagtcagagccctggctcagggagctcccagatctgggctccctgacgggctgcagctcttctttccttttcttttcctgcaacttgacaagcaaggagcatgtctcaaccctgtttgtgttacagttcttttagccttgccatttggtgggtcctgagttctcgtcctgcaaccaggaagaatgaggtatgcagacaagtggagggtgagcaagatgaagaggagctttattgagcgatagaatagctcagaggaaacccacagggggcagcttctttctacatccagggtgtcctgacaagtgttcagctcctagcagagagggtagttcctttctgctaggcaagtcaccctgacaagctatcagcagagagggcagctcctgtctgcagctggttgtctcgtcgtctgcatagctctcagcagagaggatgccctagagtaggtggctcctctctgcaggcagcttgtcctgttatctccccatcatctctctgtagtctctgtactctcagcagaaaggataccttggagcaggcagctcctttctgcaggcaggtcgtcctgacctctgtagctttcagcagagaggaggccttgaaatgggtagttcctgtctgcagccagtcatccctgctcagctctggctgagcctgaggcttttatgggcctcagggtggaggaagtgtgtgacgactggtccacgggcaggcccagaaaaggcaccacaggttccctctccagtccacgggactggcagcctggcatccatgcttcaggccctccctggcctgaaggtggggcctcatcagggacctactcccttcctcccaggaacttgtcttcctcctgctgctgttcatggcaccaggctttaggtgccattgggcatctgcagggctgcactgagctgccctcagctgcccatcaggttccttcctatgctggtcagcgcccaaagtctggagggggtcgaggcagcaggggtttggagtgtcagcactgccctgagtgtgtgcacacacagccaggctgtgacagtgcccaagttctcccctgactttgctctgaggtcagagcaaatgctgacagcaggaagaagaagccaggcagtgggagcaggcatttttaagcctgcaagggcagagagggggaccttcccaggctcccaggagtgcagggatgcctgggtctgcagccgtggtttgggcagctgcagctgtgtagcaggaggtggggtgcttctgcctgctctgtggagtgagaggcccaggtctgcagctgtgatttgggtaactgcccccaggggagctcccaccccatcagcttggaagaagtggggctcccacttgtctctggttcccactggctccacagagggtgcagccctggccacacctccctgctgctgccagcgtgatggcagtggctgctccaggtgggccaccactgccatcaatagctaagtcaatggctctcaaatgtgaacgtgtgtcagaatcatctgatcattactcctttcccacagttttttatccatttcgtctggggtcgaatcctagaatgaacatttcttaaattcccagttgactcttatgctgctagttcaggaaccatattttgacaatcattgaactaagggcttgtaaaatagtgtgacgtgggtcagaatgcttgatttcctggcccatggcaggcgctattggctaaccaacaaaacacccattcctgacccactttttcttcacctttcaccaatatagaagctaagaaaaggtaaatggccactttctcagactactttgcagttaggagtgagcctgtgacactgtaacagatttctagttaacggtactaagcagaagtctgcaagggatgagaatcagttctgggaaggttattgctctacctaatcacaaatcaagcaccatatcctccccttctttggctttgagcacagatatgatccctggaactaaagcagccttcttggggccatagcatacatacataaaggaagagaccaacaaaataaagttggcatgtggccagtgaggaacaccagatcattgccaatagccctctacttccagatgctgcattttgtgggataaaaatctttattggttaagccacagtgaattgaactttctgttacttacagccaaaattactcctaactgacaacaaaccatatgttttatgtatgtgtgtatttatctatttattggagacagagtcttgctctatcccccaggctggagtgcagtggcacaatctcagctcactgcaacctctgcctcccaggttcacacaattctcatgcctcagactcccgagtagctgggattacaggcgtgcaccaccatgcccagctaatttttgtatttttagtagagacagggttttgccatgttggccaggctggtctcgaactcctggcctgaggtgatatgcctgcctcggcttcccaaactgctgggtttacaggtgtgagccattatgcctggtccccatatgtataatttaaacaatatatatagaggccaacctaaacctcccagacttcatttcattaagctagaacataaaacaaaattagacaaaaaaccccaatcacataattatagcaacagctatgatactaccatctaccatgatcgtcattgtatgaaagaatgggcattttaacccacacaaaaagaattagaaaattttaattgactaaatctagcatttgaaaacatctttcttccttattttgatgtagatacgtgaaaatgtgtcagcgatccacaggcctcttcagaccaacatttggtagctgctagtagagactttacaccttacattctcccctcaatgaggtgtagttcaggcaaatgaagctactcacttactgagatgtgtctgtttagcttcgatcagcaatcattaataaatgaagcccacttagcatttcacaagtgtttgagcttgaccatgtctttccggttcacaccaggtttccaagtttagtcaacacattcctatagagattcctttcatcagttgataaactgttcttgcctgctgtgtcctgatatatgtgcctatataagcacacataggcacattgaagcatcagcaatgaaaaaattaagcaaaggtagagtcacaggaagtgttagaaaaaatgactgtgtatcttaaaatatcccttacagatgtgctcattgctgagaaattgctttgctcaaaactaaatccagcctgaatttttatggttacaaaataattagtctctgagtcaggttttaatcctatgttaatgagaccccctgctgtcttgactcataccttcaaattagaggttgatccataattaataagtcttacaatcccagtacctgagacaaagagatctttgggtggctgggagaagagcagagaagtgtagcaatggtattgcaattgcattcctaccacataccaagttggattgcggtgacagaaatggtgtctttgggcagtaaatccactggctcaagcttgtttgacaagggaagtgtctaaatgcccctctcaagtcttaggaaggagaatgggtgctctctgtccttagcaaaagcttttctgcttacagcaacactggtctgtgtctgcacgagatttccacttagcttgagaaccttactttgaactgcctttaacttctgaccaaaaaaaagaaaaaagcatcagagcaaagaatcatttgttttttccagctatttttgaaactctgtgacttctccacttggtagttttatagcctcgaaatttccagtgatcggaggaaagaaacccttgctgattaattacaatctaattttctattctctcataattgcagcagtagaggaaaaaaaagtgagacttattattccaaaaatgaaaatgatccctggactgtttgggcttattatgagctccgtgttacaatttattttaaattgaatcaatagaataaacatggaaatgagctctgtgaaatcatttatttttaaaggatccaaatatgctgcaccattttgttaaaaattttccagactctacctgcatagacttcttgatgaaaacaaagggaaaagagggcttcagtttagatctgggacaatcttacaggtcttcctgtgcatagttccatgaccatgatttctgaccctctttaaaacaccacagtagatcctctcttttttcaagagaggacctgaaattctcaaaaaaaacaaaaacaaaaacaaaactcaaaattaatttgtttactttgaatttttagtctttgtataacactggagaacttggatggctgaactgagacatgcaggaaagtattagagaggctggatttcctgtctcctaatttggttcagagcttttgggctggggtgtgaagggtgtccatatgagaggtggttacccggcactttgggattagagctggctctccttgtgcaattacctggttcactgcttctaataggaaggacgggttgatttttgcctcttcactttccgctgagtcttcatgtaatccacaaaggtttatagcttttagttgtgtgtgggagtcgggggcgggccggggaatgggagatggttagtggtggataccatgggaattttagatatctaccttgtgaacgtcctgcttaaatgggtgaagtacaatatagcactgattgtaaaaagtaggttatgaaattttatatacttatggggtttcttgtgtgttttatttttatgtataaaagcacatatgttttaagtagacaaaaataggcaatgtatcgataatacatattttatataaatgatgctatgtatgtatatatgtacatttttatttcaagagctctcttacatatgtatatattacacgtatgaatgttttatatgtactatatatagtatcagtatatattcctaaataatataaaccataaatatgtatatatatttacatatttatatgcgtaacatatgtatatgcatgtgggtatatgtatatttgtagaaatatttcttactatacaaatatatatagttatatgtgtatctttggcaggatataaaatatataccaaaatatcaaatgtatagagtggtcatttctgagaagtaggattgtggataatttttattttctatgtgtgtttccatattttataaatattctatgaatataaagcatcacagtgcaagcacagaaaaactgttaaaggaaaatgagatgaaatgccttcctgcaaatcatgcaagtcctcaggaaaattgttttcctgctctggtgagtgagggttcctaattctctgcttatgagtccttgtcttcatctcagattgtggtctgcatcccctgggcatacagtctacaggctccatgggtttccatggtcctaggattgctccctctccccctttccttctcttggcatgaagaagctcactcatctgataccatcacaaagaacccccagatccctcaaatgttcctgttccctgtgttcactgatgctgctacaattttgtcacatgcatgtgttatttccctcaatctttcaaggcagacaaggggaaaacaaagctgtaatattagtgaggcacaagttctagactggtattctcatatccatgacaactgacagggcttttcataacacagatctctgggtcccacccctgcagagattctgactcagtaggtctgactgggccctaaagaacggcattgttaacaagcccccagatgctactgatgttgttggtccttagaccacattttgaggagcaaagtctaatggtttttaaagcatgaaccccataccagcagcatcaggaataccaatgaattttctagaatcacagactttcagattctattccagaggtgttgtatgcctaccatataccaagtggatccttatcatcagtttggtgacagaaaaatctgtattttagcaagattcccaggatattcaagtgcacgtagaagatggagaaacaccagaatagacaccaggaagaaggcaggtgcatctaaaagaaacgaagaggcacactgacctgaaagagcctggctgcccccctcccttaggtacctgattaaagtcactgtgtcctaaatctgagaatcagcaccaggaagaaaagatgaatttctcaggggtaaagaggcaagttcctaggactgaggcataaaatcagaatgccagtatattcatttataatgaaaagcaaaacaggtgagagatgtgcaatggctggaggaatctccctgggaaggcaggcaacagtgaaaatccaatcagacccagcaagtgaccgggtgagcagagagcaagacccccaggagtccagggcaaggttctgaagttcaagggctctagcagtgagagccttatccacaagaccaagactcttcggaggccagcccatggcatcttctctcctgtgccctgtctgaatggtgtcaggcggtctccttggtctgcctttgttactcctctttccaggactgaacaaaccatttcccatcaagatgttcttttttttttttttttttttttttttgagacggagtctcgctctgtcgcccaggctggagggcagtggcgggatctcggctcactgcaagctccgcctcccgggttcacgccattctcctgcctcagcctcccaagtagctgggactacaggcgcccgccactacgcccggctaattttttgtatttttagtagagacggggtttcacctttttagccgggatggtctcgatctcctgacctcgtgatccgcccgcctcggcctcccaaagtgctgggattacaggcgtgagccaccgcgcccggcccaagatgttctttagagaggcaactgcttcaattaggccacccgttatgctctgtggatgttgtgtatttctgctttctttgttcacttaaaagttgaactattagtggaaaatcccctttcttttatttcaaagttccctgggtttatcacagagcaggattcacaagattctcacagattgttctgtgatgttttcagcattttcttttccttactcaaaacaaatcgatagactaggaatgatgatccccattttctcaagtgaacgattgagaataaaggagttgttatcagttgaattgcgtctccaaaactgatatgttgaatgatgtgtatctaacacctgatacctgtgaatcatttggaaatagggcctttggagaggtaatgaagttaagatgagttcatatgagtgggctctaatccattgtgacaggtgtttttataagaagaggaaaatgctgtgaggagacagagacacacaggaccaacgccatgtgaggtcagaggcagaggctggagggatgcagctttaagctaaggaatgccgaggactgaggccaccatcagaagctggaaagaggcaaggaaagattctaccccaagtctcaaaggcaggctgttcctgctgacgccatgactttgaacttctagcctccagaactgtgaaacaaacatatctctgctgttataaaccacccagtttgtggtactttgttttagcagccacaggaaactaagagagagatttgtttgttttaattgcatcataggttatccaagttggtgatagagacagacgctggtgggcccccacccccagatccccttggtcctcaccatatcagcatacactgatggcatcagcctgcagacacctgctcttctatacccgagggctttctcttggcccaagaagtgagaagtttgaaagtgctgagaagtcaacatctccaggagcagccttcagccaacaatggatggaagctggaggataaatacaccagctttattcctgcaagtgaggcctcactgaagtgtgttccaatccatctcccggaggtcccaagtggccttgagcctctgctgtccacactggtgatctgttcacaactcgccccacgttgacttcctctccttccctgctccccagtggtgtttcctaggaccatctgcaaataaacccctgctgctctgccttaaagaatcttctggggaaacccagccaaaagcagacctaagactgactcacacctaaggctgtgttccttccactctagcacttttaggagatactaaatgccatttttattctttggtattttctcaaacaatgcgcatataatcaacaaaacatgtaaccacagactttaaaatgcattcctttgtgctcccataggttttgttataaacttcccaggaggccggaggtgaggtggggctgctgatgcagtgtatcatggtgaagctgtattttagtgtcaaatacatgtcaggcccatactgaatgccttatgcacactatattattaaatccccgataagtctttgtattatggttagtcttgtgtaggttgtcctttgacatagagcaaaactctttgaggtcaagcatcatgtccaacccattaaaatagactgaaaaaactcccattaacacaacagtgtttggagaagtgaggggcaggatggtggtgtgccttcaaggcattccctgtcttccttgtacacccacagtgctttgtgcttcttaaatgttcaatgaatatgtgataggattgaatgatgggcaaacaagaaaaatccagcctagtggagcctcaagctaacacaatttgggagcctttgttattatgataaaatatttataacatagtatgtattattttaaccattttaagtgtaagattcagtggcagtaagtatacatgggctgggccctgcggctcacacctatattcccaacactttgggaggccaaggcaggaggatcccttgagcttagaagtttgagaccagcctgggcaacatagtgagacctcgtctctacaaaaaattttaaagataaattagccaagcatggtggtgcatggcctgtagtcctacctacacagaaggctgaggcaggaggctgaggtggaagaataatttgaccacagaaaatcaaggctgtagtgagctatgatcctgccacttcattccaccctgggcaacagagtgagaccctgtctcaaaaacaaacaaacaaacaaaaacaaagaaaagaaaaaatcagtttacgtaacaatgttgtatgactgtcacctctatttccagaacattttaatgaccccaaacagaaactttgtaactataaagcaatcactccattctgcaatctccctagcccctgataacttctaacttactttctgttcctatgaatttaccaattctgtccagtgtaagttagcacaatgttttccaggttcatccatgtggtatcatatatcagaacctcattccttttaaaagctgaataacattccattgtaagtacagactacatttcatctatccattcttctgtctgtggacatttggcttgtttctaccatttaacttgtgaagaatgctcttgtgaacattgatgtataagtatttgtctgcgttcctgttttcaactctttggggcatataggagtagaatcactggatcacatggtgattatttcctgtttaactttttagagaactaccaaactgttttgcatggtggttacgccattttatgtaaaatttagcctgggagctggagggggagagtttcaagttaagaatttaaaaatatcttacctttacgtattacaaaaatacattctgccatcttcagatgatgatgtctgccctcttgttcacaagatggctgcctccgtattgtgtgaatatgttgtcgaggctcttcctcagaacctgtgccagtgagaagccttgagcttcagcttcattggcttcttgataaatccatctctgtggatttacatctaagaacaacttctcgtcatttgctgaaaatcactgaagttcgaatcttacaaataagatgaaaaagggaagagctactttgtaaatacttctggggaccaacatgctgctgaggttttaagatttcagcctgtctcctggtgatgtttgggtgaacatcttcccttgacagactgtttctcagtatcaccttagactcagtcaggaagagcccctacaaaaagccacatgcatttgaaggcctctctcctgctgtgtttcaaagttccaagctgttttgttcaggctgttcttcaggtgcccaggactctgacatttctttctaatgggccatgatttggtttcagagccatgtgtgccttttccccggtccatccttccacagctctgcataccttggtgtccacaggggagccgagtatgtctattggaagtatgggagaattggatgacatttgaacttgcaggctaaagtgtctgaatatgttctctcaagacatctcacaggtaggacagagctggggaatgggaagggaagatgcccacccatggatcagggactggaactaggatcttcttgtatcaccatgttccagcacaatgccccaaaaggagttcaaacactcaaaattgcaatttgtcttctcaggttgttatgatggcatactattttccaaggcatgaggacagaacacatttaacttagcagtttataccttaatttttaactggtaaatatttagtatgtgatttgcgggtcattgttcctagcttgctctgggtcccacaagtgttaggaatggtcctgctgtttccttctcatctgtagtttgctaaattcaaattcatccatccaaatacctgaataaacgctgatcaaattcatcaagagggttattatttatttaagaatcttgttgtcaggtagtctcaggattggttgggaaactcaagaaagcaatgacagcttggcactttcttcccttctcatctgtcttcttcaaaatgagagatgtctgtcctcatgcacgcaagatggcggcctcagctccaaccatcacattgtcacagacattgccctgagaaagacaaagggcatcaggaaggctttcttttttctggtagtactcttcagtgtggaaaatcttacccaaatgccccagcagaattcttcttccatcttattggccataagtagttacattatctacttctactcaaatcacagccaaacagaatgagttatttgatttgcttagaccatttggaaattgtcatttggaagttgcacacattgcctcctgaaaataagagaaatatcaggttgctctcagtaaaaaggaagggagaacttgctttaggctgggaagccatagcaacagacagacagaggagttactttccttagaattataaaggaggattagtaattaggaagcaaagaagaaaagggaatttgtcactggatagaaaaggcagccacagataagcttgtaataagcagatggtgagaagaaaatgttcaaatgaagttctgtgggccttcattataaatggtgaatgattaattatgttgcgtttcattaaatttatgagtcgtatttgttatacaacacatcactaataaataatggctgatggattattattgctgttctccatcactatggagaacatgatgtcttttcaccagaattaactgttgccaggagaaaaatcaaccctaaagccttcattgctcgtgaaacaaaatgacttaatcagctcatcctagaaatgaaagagatctggagccaccatttaaaatcctgacaaagcattcaactcctgacattccaaggagaagcatctgggtttgattttcttttgtcttatcccagggacaagcatagatgtaggaaaagtgcgcacatgtcaacaacgtgccatacatctgacagctgctcaagtgctcacctaaccccaaggtatttttttacactgtcctattgcttgcctacaactctaagtttacatctcagtgctagtaaggttatggtgcccttcttctatgcaaagaacagtgcatttatatggaacataaatattatgacctatggataccaaatatataaaaatggcctggaggtcaggattaaggctcagtagctacatttctacacagtcctgataagtggcatttttaggtaggagcgataggacaacaatagaggtgatatccacttttggaagtgatatgtggcaggataccacaaggtagggcagacctatataaggtagcacactcactgtgtgctgctcgggctttctcaccatgtggtggccaggttccaagaggctgtgtcctccctgagacaagaaatagaagctgccaatttcttcaggtctgagcccaggaattgtcacagcatcatttctgctatattccattcgtcaagaagtcagagagcccagattcaaaggactgggacatacactccacctgttgatgggaggagtatcaaagaattgggaagccatgtcttcaaaccatcacattagcttgaatgttgtttcagggagccttgcctagccacctcctcttaagcagccctggccactccttggagttactctctatcacaatatctctttggttttcttcatagcaccgttgcctggacttactttgtaaatgcatttatttagttgcataattaattttaagcttatttcccatttagtatgtaatttccacaatagcaggaacattagtgatcttgttcacagctatatccccatatagtaggtgctcactaaacaaaaagttgctgtacaataaacatttgttgagtggatgagtggatgaaatttttatcatgtaactcctttaacagctcataacgaggatgtgtgcaagacttaccattaacactggttcctcaggcttctttgtataatctagggctctcattaatgtgaccactcctagacctaaaaatccagctaattatcgcagatttaacctgtgaagctataactcaagctgcctagaactaacgtaattgtggctgagcgttgccttatggaaatgcaccaaatccctgtcacacaaattcctagctctgacatgaaaaaattggattaggaaatagctaaggaagagacgttcatgaaggcgcagctttctgagtgcagagaagaatacgtctctgcacatttgttactgtccatggttatagagttattgggaagcaaacagtaacagtgcagcggtaattctgagaaaatgggctgagtgacttattgcctgttggttcagagcctgcaaatctgttttccaaagtgcagctgggaaaaagctacagaataatgttctgctttttacctgctcccacatcctttattgggtcccaggagggaacattgagcaaggagtaagagaaactcgcgtaccagattctatgtgtgacgcaggctgggtagctacaagatggatatttaccagacttcaattttcatctcaaattagtgacgcatctccattaatgagggcagacctcattatgattgtgcctctctatttctttttggaagaaaataaagtcaattaaaatcattgcatttcagaagaaaagcaattcacactgtgttttattagtagcacaatggtgctgttttctttgttaccaagacaaaaattaacaggcgtctaatggcacaaaggtgggtgacaagcaaaacaggctattagtaatgtggctgttttcagacttcgaaacagaaggaggcttccaggatttaaaaacagaataaaagttcttctctgtgctgtcagtctctttctctgagtttgtagtcctcctttcagtcaccaccttatgctgtctggttgaaacatttaaagactgttgtttttttccctagcacatctcaagtattaaattaatataaaggaaacctttaagtcattactggagattaagaagtggttttagatgatttgatggctataaagttccagttgggagttttggtgtttaattgtatgtgttgtatacttaatatgtattgtttttagttttgactctactttatgtattattatacatatttgttactgttttagttaaaacagtaacaattttggcttcaggagagaaaagaaaggcttccttagaagttggtgacattttcccaaagaagtcactgtgaaactaaagaaagtagaaatcaaagaggtaacatctgacaaagattagtgtgaaaatagggaaagaccccaggtcttgtgatacacataaaactgagcaggggaaatactctcaccagagacctgatatgatccaaatagaactcttcatatttcatcctaaagttgtttttttctgtccgactcccccaattcttctccaaaatattaccattctttcagattaccagcctggaatattctatctctgtgtcttttatcttcttgttgtttcttaaaattagaccttaaatatgccatttatttccatttttttctcttatatctacctttttgttgttcattttaagtttttcatttctagttcagagtgaattgttggcttagttctggttataatgagtttgtataagacatagaggatgaaatgttcaccaaatgggtgtaaatatgtgattagaattctggagaaccttcaaggtatgcaaagaaatccatatttgaaacccactcataagaagagacagtggtggatctcatgacactgaactgaatggaggtagtccggcgagaggtcaggtttaagagccatcactagggtaagaggagcatgaacaagagccaaaggacgcatgtgcagaaatagaagaaaagaatgtggtaagtccagtatactggtcagcaaagaagaagctttgagaaggatttgtcaagtcatcactgtcaagtattgtagagaggttcaagagggatggaaaatctcatcagtgagttgagtttgacttccaggaggggactttctaggttgtgtagagtcttaggaaacaaatggaataggagcaatggatggcctgtggtgtagaagtctaaacaggaatgaataatcttcaaaataggtcggaaagcttcccagatcatactcacctttactcttgtcctagtcttgatttcttccttcctctcccaaagcagaggccgaggaaatggcttgagtgcaggtagtttatgcagaaagcgatcccaagaaacaagagtggggtctggggagaagtgaaacaaggaagagaaagaaatataaggatatattgcaaagccagtgaagctgaagctgtttgcacctcaggaccagaaggtgaagtgaatgttagcctggttccccaccttttctccttatttcttcccaaacccgacatttttgaagctctgtcttcaaggttgttggagaaacatctggctagaagactctctactcatccctgctaacctctcactccccacccccctaccaatctaatgaagactttagctccagacattcctgcaccgattcatctttctctccccctccaaagcttagggagtatattttatttacttcatctggaaagggagtcttcctacttcttcaggtcattctctattcattttttctcatcccctctccctcagtggatttaggttttggggacaaaagtcacatctgtgtagttctcatataagacagccaccccaccaacacacacacacacacacacacacacacgaacaaacccagtgaaactggcagataaatactcctctctcccattccagtgtgaataaatttggtattatgcccttagactggccttccctccttctccatctcactctgagaatacttgaatgagaaaaggaaagaggagaaataatgtggagaaagccataggtgaatatctccaagtatattcagttattcatgtcttcaaatgaatacttgaaacaagtttctattttcaaatgtcacccagacacaaaagtttatttttcttccccttagcttgattgtaacaggctgtaagttcattgagattaggcactatgtactaaatatattttattcccatctgttgcctaatacaatcctgggtatatggtcaccactgcaagatttgtatagtggtactgtcattggctcttggaaacatttttgggcctgagagatgtaaatgtcttttttttttttttttttaacatattgactaaagcaggtgagcacctttattctggtaggagagagatgctgcctatgtaaaggttcattaggtacttgccagccaggggaaaaagaaggagcagcaaattgccttcatgggggaaaattgccagcctgccactgggcttacccactgttctttgtaggacctcagagggcaaaggaagcatcacacattatctagcaacatcagtgaccgcaaattctcatcgcagccaattctccctacttctctaccagaatacttctccttaatcttgttctccttcatagcctttccttggtaggtgctcttagtatgatcagttctggctgtttatgctgtaaattcttccctattgtccacaacagaaaactcttgggcaatgcagtgaaatgtcaggagattatctatctaaactatctatctatctatctatctatctatctatctatctatctatctatctatctgtctgtctaagtgccttttaaaaattacccctcaagttaagattacttgtctcagaaagtcttcctaatttaaaccgtgttgtttttcatcatttcatagatctgtgtgaagcgaagaattttctgttacagtatgactggaccagactaaacacccttggttattttcactttgtctttatttccagagattaatgtcactgcaatggacactgagcaatgacccagtccattcctttgtttctgtgtggacagtacaaaaagtatccacactgaacactattcattttcagtagtgaggaaatgtttcagtgattttgttaacatgtagggcatttgtaaacaattccaactgacctaaaatctgggcaggaattgaaataggattccatatgaaggagatgtttcatcatagcaaattgggagagccactttgggaaatagtttggcagtttcttatgaagctaaacgtgactttaccatatgacacagcaatcccactcttagatatttacccaaatgagaggaaaacctatgaatgcacgtgcttattgtggctttattcacaattgcctgaaactggaaacaaaccaaatgcttctcaagaggggaataaacaagccttggtacatccatatgtacaatgaaatactactcagcaatagaaaggaacaaactactgttccacacaataacatggacaaatctcaaatgcattgtactaactggaagaaatgagacttgacatatcacatattgtataattctatccataagacatttttgaaaagggcaaatggtagaggcaggaaacacatcaatggctgccagccccaggaagaggttgatgacagagggatgtagaggaattttgggggtgaagaagctattccatatcctgatggtggtggatacacaacttcacatacttgccaactcatacaacttacaacataaaagcacacaccccagacacacacgtgcacacacacactcacgtactctgtaaggatggttgtgcatccactagcaatctgtctctttttcttatgattttcagtggcttccttctctcctatgcaatgcaggaacagcaagtgccttacacacaggtacaggctcacattaactcagcttaataacttcagagaaaaggggttacttcttgtctccaatgatgtgcatataaaatcctaggaagaaacttggcccattttggatcaagtgaaatttcttggccaatcacttatacaaaactgatgaagtgctatttttggagattacacatttattcctatgacctgggagatgggatatactgatctatcacatggagtagagggcaggcctggctccagaactcaaaggtgttcctattagaaaagatcaggagactaaaaaagcagagaccactctactactggtcttacattcacagcatataggaaggccattacttgggaacttaatgcaataaattgccacaagctgttccagttagccatctaaatctgtcctcccaaaccacgtcacagtcactgggaccttgagacaaatagaggttcctgattgcctaactggttatgtctttgaccttgttattgtttctattgttgttgtttttgtttttctgtggatcgtaaactctcttgagaatctaatgagagctttagaccgactgtcttgaaaactatagcagacctgaggacccatacccaactctccgtcatctcatccttcccacccctcacctccaccagttcataaatctcaggaaaagattattcatctagaccagtggtgctcaaatgctggcccacattgtgataccctagagagcttgttaaacatagatttctgtgtcttaccccagagtttctgatttagtagggctgggatggggcctgaaagtccacattaacaagttcctaggtgatgtggatattacggtctggggactagactttggaaaccactgctctaaaccatagactaatgatgtcatcacttactgtcctaaatcacacttctctactgccgaattttcctgaatgtgacttagccaccagggagtgtgaatttgagtttattgtaacatatgcaatcttgatgcctctgtaaggagcactgttgtgaacaaaaacaataacataattaaatacttattcacatattgactcatatcttaaaattgagctacttaaaatatggacagtgttcttccagtggattagaaaaataaacgagaaatcagcccttaaaattacacttaaagatcttaacaattattgttaaaagagcctgccttttaaaatgaatcatttgcatgttttcagttatcccattttgaaaaaccctaacaatgcatattcatatatttttacaaagttaaggccagactgtgtaaacaattttgtttctatttttgtgtaactttctgtgtgtctcctcacaccattccaaacccttcaaaaacaatttcccattggaggtgcaagaccgtcatgtggatgggtaagaatttgcaaaaaaaaaaaaaaaaattccatgtttgattttgatcattgaagtttctgatttccaaaaattgagaattataaataatgctttgatcatagcctcaaaaataaatggtttatttccctcaaatataatcagtatgtctactggatcaaggcatctgaattttgttaaaggctttccttcacaaatattgtacactctgattatctaggcaacatagccagttccaaggacatttgtgtagggttttaagtccccaaaagaagggagacattagaggcaagttgcacatatgttgttactcccccacctctttaagaatgtctcaccatgccttctaatttctagccatttagccttttaatacaaatctacaaggcaacttattaggcaaacacaaagaaatagagaggccctggaaataactgtgtgacctgaggatgaagacagggtgattccttcatgccctttcctcggtagcctgagtgggccccaagtagacacatgtgtctgaagcatttgtgactcctgctgacaaccctggggatgtcctgaccctcaaggatccaaatcacgcccatttcacagtctgttgcaatccaaacctctctaattgacaaccattctctcccaacttctgacttcatggtctttaaggtcattttcctgtctctgtttttatctcggctgtagatcagttcctgcaggaagttcctgcacccttgtaagaccaagagggaggcacccaggtatattagttttttattgcagctatataaattatcataaactcaggagtttaaaaaagcacttattatcttatagttctgagtgtcagaagtctaaaacagctctcattgagctaaaatcagtgtgttggcaggtatgcattcctttctagagactccaggcgagaattccttttcttgcttttccagcttctagaggccccttcggttcctcccggccccttcctccatcttcaaagccagcaatggccagccaagtttttctccatcacatcaatttgactcttactcttctgcctccctcttccacatttaaagaccttttcagttatatgccaccccaccccccagataatccaggataatctctttatttgaatgccagttgattgttaaacctaattccataagcaacctgcatcccccccttgtcatataatgtaacatgtgcataggttttgcggaaaagggagtggtcatccttgggaggtcattattctgcctaccacaccaggactccaggatcctttgcctggacagaccatctagtccatctccaaatgcagaggcacagtcagtgagaacaccccagggctgaggggttcccaagattgctggagagtggtgagaaaactggcttggatgtgcaggctgggggtccacacacaggcacggaagacccctcacggtgctgacagagacatggcaagatgtgaaaggggcagggcaggctgccagccaaactggggggcttctgtttgcacctaggccctgggactcatagcatgggctgggggtggtagggtacacctctaaaagggaggaaaaaaagagaagttgtgtttccattttctgcttcagagaaggttaattgatatttaaatccaaatcctgtaagttctttgatatttttgaggaattaaatcacagatgtttctgttctcttgctgcactttatgttgctttatagtttggctttaattatttctggaacaaaatgagggataaataaatacacttttcaactttactggaaattttcttctttatgcacacaagctcagaaatgtaatgtggtgttatcttataatttcatttaattacataatggatgatttatattctaggagaaagagaggctagaatgtggttaccttgttgatttgaacatttatcgttacaaaaacctattggttaggcttactttgatgtggttagaacatttccagagtaataagaacttatccacggtaagccagcgtatatatatatatgatacaaaaacagtcttctaaactacaaagcctggtactcaacctcagtgattcagaatcttgaaagccacacaatgactctttctaaagtgacaagtgtccaagtacccaaagcattaaataaactgttaaatgacaacaagaagaaggaactccaagcagtctctggagtttaagcatctgcaatcttatgttaccaagaatttgacacctttcttattccgaaaattagctaaaagtttatttgtcagttatttcctttttaatcttcgaagctctgttgtcgtgtcctggtgacggtgccatgcttccctgaggtacagcactgaagcttgaatattactttcctaaatcttcatttaattttgttagcttttttcttccatagatctttgtgattgggctcaaccgttctcagcatgaaatcttaacctttttgacccttaatcccaatttccaagatgctgaggaagcacttgtttctttgtacttcaattttcttgggaagcttaaaataagacactccaggcagctgactgtgtgtgaggaatcatgctatagtctcagagtattttcctcagagtggagttgaagcatgactcatgcaacaaatgcaaagctagtagtgggtagattgatttaaaaaattatttaaagtaagggctcctgaaaatgattcatatatgccttaaacatttttattttaacttaaaacacaaattgacattcatttgccaatctttgatgtatagctaaggtctcttctctgactctgggtcccttaattggcgttatgtgttgtctctcttaataaatcatacctttaatgtatcccctatgatgcccaacttcagtttctttacattggagtaagaattaaagtgacgtgcaaagcaatcctattgaataatctttttgattgttacaatttctctccaatacctccacagttttctcagccatacctaattcaacaaaccatttttattggcttgctttcaccaaaccattctgaagcatttgctgaccaaagaaaaaaagtctgtttttttaaaggattcaagttagttgtattcagcggtcttaatgaggactgtaggccgaggcctccggcttgggagcagtcctgtaagactggcccagtgtttcagcccacagcttacatccaggtggtgggggctcagtatgggcaaaatcacatcaaagttactcagaagttgtgttgaagcagaatcatgtcaaggtttgggtgtgagagtacatctggttttacattactaaagttcatttgcttatagattgtagaagcacagtcactaaccctgtcacatgtaatcttctgtgtattaaaaagaaaggactagggtcatgtatcttttgaggaatacagtgacccaggcaagagacaggaggggtccatgtgctctatcctgttttgtcttcaaagcatctttccagagagctgcacatcgtcacagagtcaggggctttgtgaagttatcctggcaagcagaaataagcaaacatggcttttgtttgctactttgtctcacatatccaacttttatttcactgaaacagctttttctcaaatttcattgatttgcataaatccaatttacataaattaatttgctttcataattataataacaattataattctaatacatttggtaataaacccagttgactcttggtaagtaaccctgttatcaaggcagaagacgagtgcctgggcttactagagagatgctttggccgaggaacggggatgtttgggtcactgtaggggaagctggctgtagccatcattgactcctgggcccactttggccgtcacctgcagccttgctgtcttcctccctcaagtgcccgtgcctccctacctgagggaagtctggaattgctgtggcgctggaactctcaggcatgagattcatgagggacagatgttgatgggtaaatagtccagcattcttctgcttccttaggactgttctgaaacagattctactcggtccccaagctgtccacagtagtcacctgctcactgatagaccttttcttggttccctttccttctgcctcgccttctccattctcataagtattcctggtatcacttcccaaatcaacaacttacacccaaatctttgtctctagatcttcttctgaggggatccaaattaagacaatcaccaatcaatatgttgtaaagagagaactcagaaaattgatctggtgagcgtactgaatagaagctccataagaaatgttccactgtttttggaaatctcatttggtctctctgtcttctgactgttaagcagttttcatccttatatttacacacagggtcctttctcacaaccaacattttgccttcttctttgtgagcccatggaagacatgtgttggggaacgtgttacaagcttctcgctggggccagagtttgactggtgtcttgctttcatccttctgccccagttcacctttttaactcttcatttgccctgaattttacgaactggtcatcctgggtctttggtaccttctgtggctctactttagtctcctatcctctagctctgccttacctagacctacaatttacctgtggttctgggcccctgctataggaatctactctaagctgagatcctgtcttggatttatgccctgaaactaccattcccacttctcattctgtgtctcttttcctcctaacccttccacttccctggactgtgctcatggccctctggcccatctcttgcctgtgcacttcaggtggtgtttctaattcatggcaagtggtatttctaatgcgtggctttcaaaatattttcctgtaaaacttaccttcctaccacttagagccatctaaatgtttttcttcaaagatacacaatattgaattaatgctctttcagaaacagaacgaaactattgtactgtctctcccccattcttaagaatgagtgtttggattgtaaagtgattgaaccacactcgattctctcttattaatggaaaattggccataaattgctgaggcgtgactagctcatttcccaatacagctgcaaatgctttatgtggggatcactttcgatttctgagaaagaaaggagaaaactctacagaactgacacctcactaaacagtacctcgtgtcactccctaccgagaactactgttctgaagaggcaacgaattgaagatagtgccaccttcagccaaggctgtttccttagagtgcatatttttaatgtttttatggtgtggtagatttggctgcaagctttgaaaaggcagccattaaacattttcgtttttttcccaccatttaaaaaactagtctaaaatgcatatatgcctgagaagtgctctgtatttagcgcacaattcataatgacatcttattataattttgaaagcacagtacattttacaaagcatcttcacccataaattatccatttcaatctttagaaatcctcataatatatatactagtacccccattttatagatgaataaggtgtttggatagattcattgatatatactcaaggacacaatacataaaaagacacttgaggtcatatcttctgataccatgtctagtattccagtagatatccatcttctgtctcccccaccaaatcttcttttctcctgggatcagccctccctttggaaaattattttttcctgacttcagatgaaagtcatagagtggctgctaaacactgtgccccactgaccccatttcccagggtctataatccatgcaataaaaagagagttgcagtcagcattttttttttcttttagtgagaaccaagagtcacttcttccctctcagttaatgaacttcaaaggtcttctctgtcatgtttccagtctcataagaaaagcagtaaagtccatgagaatgaagctgacatgggaagaggaatcagaaatgatgaaagggaatccttatggtttgtaagtagcttgtgccaacccatgaggccagctgatcccatgccttatatagctttcttaccacgtcaatacagtcactccttcccctaaccctaggacttgggggtctgccatgtgtgttaaaaagaaacaggtattgggtgggtgtggtggcttaagcctgtaaccccaccactttgggaggccgaagctggcagatcacttgaggtcaggagttggagaccatcctgaccaacatggtgaaaccccatctctactaaaaatacaaaaattagctgggcgtggaggcatgtgcctgtagtcccggctactcaggaggctgagacaggagaatcgcttgaacctaggaggcagaggttgcagtgagccgagatcgcaccactgcacaccagcctaggcgatgagagtgaaactacatctcaaaaaaaaaaaaaaaaaaaaaaaaaccagagagagagagatacaggtattccagtgctgcattagctcacttgaaccttacaagaacacgatgagttaggtggcacagttattacaatatttatttttaagttgaattaactgagactctgttcatttgagtctaatccacagagataaaactagtaggtaaccaagatgagattatagctctcttcttttttataccaagtccaaaacctttctttcttaccacatagtatacctactgctggtggataaagaaggtgaaacaagacagaattctaccagttgacaaagtatacttttccattgctgtggaagtcaaaatctccatgtagtattaactcagatgatcccgtttttaaattaacaaccattttttctccagctcactttatatcgcgaaagtttctatttagtttaatcatttattgagcacctgtttcacctaagaatcaatattattggtggaaagttgaacaaatgtataagatataatccctgaattctaagcattctatagcttttttttttatttctctaatgtgcctgttatttttcataccaggagtggtatcctgtacaaatccccttaaccaggatggagccctgtctcctccaagctgctgtgtgttgggtgttgactcacagcttcctccttctctaaggcaattgccttaggcttccgggagctgctgcaaatgtctacaggttgtgcccttttcttgaggcagctttcaaacaatgacagactgatcctggtgccattcacactttaaaacttcctgtgggaccaggatgagcctagatttgtcctattctgcttttctccctccacagcagtccctcctgagagcactccattacttgccaagcatccccatctcaggctctgcttttaaggaaccagacctaagacgccctcttcttaatgtctcatctatatcttcacatccacgtcatgtttgtcttttctactggctcttgcacccacccaatcacacatttgctatgttggtcaactggaacagaaggagcatcttggtggtttcaggatttggtaccatatccgtataccccatgctgcacagggctactcagctggctaagctagtggatgtaaagagtgagggatagcctgtatttcctaaaatagcatagcagcaactgcactaattttagataaggacacaaaatgcctggggatataaagatgtgtgtgtctgtgttttaatccaagttgaaattatacaaagaaacttgcaagaagcacaagaaaaaagacctatattatgattttcacttgaagtgaagtaaatggaggggctgggaaatagatgccaggcacccctctccaacgtgggtatgcctggctgagtccctgagactgcagagtggcagtgttgagtgaccaccatgtgttcagcgaggagtgaatgccagaatatgctctaaggaaaagtgcagataataaacttaaaaagacaacttagcaaaattggtagtttctcaaggagttgggggtcaccaggtgagtagtgaggacagagccagccataggataagaagagaaaaggcagaagaagggagaagaagctcagtaaatgccagatggggtgcttgttgatacatgtattccagaaagtttggctggaaaatgtggacaaaaagaattgatcttgattgggcacatatattataaaacaggaaatagtgcttatctttttacaattacgtgaagtatgggcaatgtctcatcttacatttgaggaaaccagatttgaagttggataacttgtctgaggtcacacggctagcaagggatgggagctgaggctcaaacccatctgctcaatgctaaagcattatatgctatgttgcttcctgtgccaactatttttctgctctataacctcactgcatccctttgaaatttattttctccatgtcaaagaattggaaatctgcaactgactattgaccagactctgtcactgatattgtacagctaattatatatatctattttataactgtaatggttgttaaggtaatgttaaataatactttctaagcatctgttatatgaagagttatatcctctgcatagtataaggttgagtttctttttacttcttctcagtttttcccctttttcagctttaaaagatactagagactgggaaagaaagggcaaggagaagtggatgggagagagagattgggagagatttgttaaatgatacaaaattacagctagataggagggttaagtttcagtgtttataccattttaggatgattatagttaacaataatatatattttcaaaatagcttaaaggaggatattgaatgttcctgtcacaaagatatgataaatgtttgatatgatggatagatatgctaattaccctgatctgatcactggatcttacatgtatgtaaacatcactatgtacctcataaataggtacaattactatatgtcagttaaaaacatatctagctaattttttaaaaaaatgatagttaaaaaataaaaagatgctttctagctatggagcagccagaattagtagttcaagcgcagggactcattaacattgtgatcggccttttttcttatgatttctcccagattctacttgtagaaaaatgtagaaaacagacatttttaaagtgtgttctcacttgggtcctcgtcctcttccttcattaattgagttgtccgcctttcagtcatactcagctctaaggtggaaccaccacaattgcaccacaacccttctaactcctgacctctgatcattgcctttgtccttaaccagttctgcatttctttcatagcagtaatcaagcaaaaaccacttcctagaaaagtcttcaccaacagctctataggttataacattgctatctttctagagccttgtagcgtatgtgaatatgtattaatacctcattcatacacatgcgtacgtgtagtatattattttagattaggaaaagttccctgagatcgccacagtccccatttccccattttataaatgaggcaccgaagcccagagctgcgactttgtctagggttaaacaatcacattgtggaaaatccaggaccacagcccatcaacatctgtgtttcttcccatgactctgtcaccactcaagaatgccaggacaaggcacattacatgcctggcaggttttctttctgtgtgtttttttttttttttttttttttgagatggagactcactctgttgcccaggctggagtgcagtggcacagtctcggctcactgcaacctctgcctccctggttgaagctattcccctgcctcagcctccttagtagctgggactacaggtgcctcccaccatgcccggctaatttttgtatttttagtagagatgaggtttcaccatattggtcaggctggtcttgaatcctgacgtcaggtgatccacctgcctcagcctcccaaagtgctgggattacaggcataagtcaccacacctggaccctgatggattttgtatgactcatgttggtgtggaggacatcctggggctgcttccagaagcatatcctgcaatgaggattggagtgaaggtggtttatttaaactatgtggtttatttaaactttcaaggttaacctcgaaaccagtgaggttacagaaatagcagctcaaggaagaagaaggaccaaggaaggatatgatttcaggcaaaatttcagccttggcttgatcccatgagaatctcaggagtgcaagtggcactgcagagctctctccttctgggttcaaggagctgggttttcatatatcgttatcagtcagtcactgggtttggctccccttaggagatggaaacttctgactccgtgccccaagtggctccagcaacccaagagaagacctctgaaggaagctgcaggtgcatgtgtgcaggtgcacagctatcttcttcatccttcatgtctgaagacctcttcaaagaggccttccatggcccacctatctagtgcaggtctgtctccacccaccactctctattctattgccctactttattttctgtagtgcacttagttgctctctgaatgtatttatttatacgtttaaaagctctgggtcaatgaggcctgagatttcatatttcaccagtttaccttcaatcctgaaagaatgcttggcacatagtagttgtttaatgtatatttgttgaatagcaatgagtggatggattaaaaaaaatcatgaaggctctgtagagaaatgtggaactattagaaagttctggcagcatggactatggcacaccaaatttgttattccctccttaacattatgcaagggaacatatgtgaagaattgtattaaagtttaatctgagaaaggtgtgtagtctttcacatcattgtagataatgttagtcttaatgggtgtattttacagtggtgtaatgcttccagaatattttttgaagaaaattatggcattgaagggaggcttttagttctttgatacattatatctctcaatagaatataatagcttctttttcccccagaagatgtgtgcatttcattatatgtcattatctgatatatatgtttggcataaaaggcacttttccttttttgcatgggacacatgtagtagaaaatttccatgagttgatgtcatattctgctctaccatgtattacatttgggatagctgcagccccttttcttttctgccacggtgtggagaatatattgattcattacatcatttgtattctattcctcagaccagaaattggcctaggcattcatactggcacaaatctttccccctgcaccaataactttttttttcctttagccaaataccgtttccctgagcagcaatttagtcattaccccacgatataaaagaaatgtgaaatctgtcacagggaagatgatgttgtgacacaaagagggatcctctgggaggtttaagcaggttttcaacaagattgaaatgaatgtgacattgtgttcgtattcataattaaatgtattctttttgatgtgtgtgtgaatgtgtgtgttctttactacagagagaatgaaaatgaaaaaatgtgactgactgcagactaataacagaaaccaatcttaactttaaatatagcatcttaaatatgtgggtcatgctttaatttaagttccaaggcactcaatctaagacatcaactctataattgtgacttcaggtataggctaataatagctagctaatgtcatccccaggagggctgcagtcatctttagatgtctttctcctgtgctaggcatgagagaagcagctatggctggcctcttcactgctgtgtctccagtatgtggacagtgtcggcacaaataggcacctaacaaatagttgttgaaattggaaatagaaataggtgtgattaagatgggggtggggagatgtgggagaagaaagaagggaggagaggggaagaggggaggagaaggagaaaaagagaacttctgaaacaaatacgccagaagctcagtcccatgagggcagtcctacactcactgcattgtaaagaagtgcctaaaacaagtgaagcaacttgaagatgtcaaagtcctgagatgttaattaggaagaaagcaaatcgactgttaattatactgcaatcctccatgtcttatattatctcgattcttcattcctccctgtatccattcctttgccagacaactttgcagtgttctctagaccatgaagtgagtgacttgttccactccttgatatgggctcaaccatgtgctttcctttggccaataaagtgatagttcagagacacagggaatgtgtgtgtgactctggcaattcttctgtggggggcctctgtttatattgataattagatttttaaaaatgtgttataaaatttatgagcccatgtgagaatacagtgatatattgatgaagatttagaataatggatgaagaggtgcttatgtatttgcttcctatccaatcagtgcttgagaggggtccgcataatccaactaccgtctctttctgtcaggtccaggaaacttctcttcattttttttttttgttgttgtttgtttgtttttaaatggtcagatgtgttattctgggctaatgtcatattttcttactgcaaaaaaaggcagcaacttggctgggtgcaggggctcacacctgtaatctcagcattttgggaggccaagacaggtggatcactttgaggtcaggagttcgtgatcagcttgaccaacgtggtgaaaccccatctccactaaaaatataaaaattagccaggtgtggtggcacacatctgtaatctcagccactcaggaggctgaggcgggaggattgcttgaaccttggagggggaggttgcagtgagctgagatcacaccactgcactccagcctgggtgacaaaaaacaaaaagaacaaacaaaaacaacataaaacaggtagcaactctcttattactgagattattacaggtaattcagaacctgtttgtatactaatagcgtgaaatgatatggacattttttgactgcagttccttaataccacgtatttactgctgatgagtttattactcatcatggtgcatgccccactatgccaccataagtactgtcttctagtgactctcttaaaggttgttgaagagtgtcacaattgtaaatcttgaccaaactatgcaggaaattaggtataactgttttctggtcatattagtaccatttggatttttatagaataaaaatagaacaacacaccttccaagcactttttctctttaattctttaggctatattcactatcctagaaggtgatttcttaatgttgatctcacccctaactttttctcatcaacaccagcaggaagagtagattaggggctcttagatggagcaagtagagaggtcccacaagagcaaggaatgtgcatctcttgtgaggcatggttaagactgattcaggaaagcattacttcattacatcaactggaagggtctagtgacattggagaccagtggtcaccaaaacctcggagaagataagaacagccgactccagataatttcttgacatgggcatggggtctgaaaaagagacagtgtgacaactctgggaagcagtgcagaagctcacagagtaaaggatgcttctgtcacatccattgccttcaggtattgtagactcatggaggcaccatgatcagaatgcaaatggataagcactaatcaagcccaaggatgggctatggatcatcagtaacccagaacccttattttgtcccatgtctgatgtgaggtgagtcaccacaaagtagcaagtcagcactgtcctgctggctcaatttcatgtaacctcataaaaggaagaaatgttctgctggccagtcagtgcaatctgctcaccctgccaccctcctggaaccccagaacaaccgcataggcaggagtcctggagatctttggggcatctggtcaactccatgcatggactaaacggtcagaaagtgtgctgaagggagaaacagtgactaagccctacacggattccgctctgggctttgcgtgccctgctcagatggcacaaccagctccagctggtcccagccaccagagagggatttagaaaaagccacaataagtgccttggaagacgaggacccacatgaaaacaggttcagggttgagcacacgtccttccagatgacactgctgactccagctcgtcccaggcaacggaggggatttggaaaatttgacaaaggcactctagagcatggacccactggtatcctgcacccgacttgaccaagtcttagggagttacagtgggattctctgccagttcccagcccaggcctcaagaggacttgaatatttctgcttgctttccatcgtctctgctatctctataagaacatgccatgctagcacattggaagatgagacacatgaagctgagctctgttgcccttgccctggtagttcctactaataattagccagccctgagacatatgagaaatcagaaccaagatcagcaaaaccacgtaggcaacacccatctgaactcagttatgagtgcaatgaacatatgatcgtataccactaaagttttatgcttgtttgcatggcagtgttgttatagcaataggtaactaatccagttggctagctgagggtttagaagctaagtggaaaatcactgctccacagcaagcatcagacatcccagcaaggcttttccattgtcagcagcagctggaaggaatgtctgtgtgtgcacagatatgcttgattcttcagatatagaaatgaccaaaaataggagaattctgcagatgaagaaagatcagtatgaaggctttcttcagattgaaggcaataataattgcttttctcagcagacttttaggtacagtctctgagtgtacagatttttagcttgaaaggcttcaaggaacaatactagagcaatgcaggatgataaaggccagataagtgctgttacagtacaggatggaaaataaaatcttctcaggcaaaattggagtcctcaagtatcctcagggacagaagagaatctggattaggcataaagaactagtaggacttgtgtagatgagaaagaaagcattttaggtggcaaaatcttgtgtggcaaaatagaaagagttcctcatgggaagaatgcaatggcagtttgtactgtatcttctgagttcaagaaaatgtcctggtttaaagtaggaatgggagcatagattggcatatactgataatattagaaatagaaggaagatcctctctcttcctttaagtctaaaaataaattctttgattcatgattaagagagctgatgtgctttgtggcaacatggatgtgtctggaggccataatcctaagtggattaatgcaggagcagaaagccaaatacccatgttctcacttataactgggagctaaatattgagcacacatggacatagacatgggaaaaatagacactgggaactactggaagggagaggaagggaggggagaatggttggaaaagctacctgttaggtactatgctcactacctaggtgatgggatccaaaccccagaccccagcatcacacaatatacccatgtaacaaacctgcacatgtgcccctgtatctaaaataaaagttgaaattaaaaataaaatataaaacaagtcaagaaaaagagagagatgataccaacctttatgtgattctggagctggttccagtcctgcttgttctccactatcattcaggcattttacaaatagatatttgttattttttatgggttgcatgcttgatggggtatagatagagcaataataaacatggctgctggcgtcaagggctcacagataagcaaggaggaaaaaggtgccaacaaaattgttgtacagtgtggcaagcattataaaagacattataatgggtaccaggtgttgtcttctgtaaaggagattcagtcagctcagtcttggtgggatgggagaggagcttatgttgagatttacagaaaaaaaaggggtattgatccaagtcttcaaggatgagttggagatcccccagtagacacagagactagtgatttttttccccactggacctaacacaagtttttgaaggcataaactaatccttatgagttgactgtatgttctctctgatgactccagcatttgatttatagttttcttttctttgtttttttttttagaggcagtgtctcatctcttgtccaggttggagggcagctgtagaatcatagctcactgcagcctcaaactcctaagttcaatcaatcttcctacctcacaagtagttgaaattacagacacacaccaccacactgggctaatttttgctatgttgtccaggttggtcttgaactcctggccttaagcaatcctcctaggttggcctctcaaagtgctaggattgtaggtgtgagtcacagttcccaagccagcattttcttatttgataagttcagctagtctcaaggaggcactttctgctgctgttattattgttattataatatgtgactggttgaatttgatactcttcttttggtccataagtgtttattgaattcctcaggtaggtggtattcatggaggtaagacgttctggtatttgggttggaccaggtgggatatcttaatttaaagctaaaggaagtgaagccaaggggatcctgaactgtaattaaaatggaaaaaaaatagcaaacctggagaggtgatattgagtgtaaaccctaaagggtgaaataaggtctgtcctagctcagagtccctagaagcagagcctgggatgcagattcttgtgcaagtgaatgattgaggaagggcattcagaagaaagggactaagagaagcaagatgggacagaggaaggagtcaaacaaaacagtaacttcagctgaactctaagccttaggctgatcccacggagagttctggtgtatacatgcactgtagcactggtcaccttgagtaacaggcctttgtgctcccctttcagtctattattagttacaagctgctaccctcccatctgaagggggaagaagcggcataactcctaggcattcttgcccaaggtgacccccattggtcagagacagttctctggaaaagacaactgtgagcagttcgtagtcaactctcatagcagctggggaatggtacactggcctgggagagataatttgggtgaagcatcaaaatcaaggagatatatgggaaaaacatgccatgaaacacagacagtcattaaaaaggggtactgggcttttctttcctgggtactggttccatcactttcagcttgtcaagtttctctgtgtctccatttcctggtctgtacaatgttaataatggcagtgtctactttatttattttggtgaagattaaataagacgtttcatgtaaagctcttaggaaagtacctaccacatattagagatttaaaagtgtttgccatttgacggagcttctgactatgaccatctcatgccatgcctcttggtgttcccagttgtctttacctcttgctagcaacgtttgtctcattgaaatgcacaagctctccatttaattgaacaacaaagttcctgaatctttgaaaaaaaaaaaaaaagcagggtcagaaatgtgaagactttagagcaacaaatagaagtcaaaaacatgtgcatgctgttctgccagaaagatggagccacaccaaactttctgcagaaggcatacatgatagataatagaggtgacagctattggtgtataaaaaaacttgtaaaactaagattataagtgttattatttttccttcctcccctttctgttaccatgacttctaatattattggtacttttactgccattttttgaacatccaataaatgtcaagcactacacaagatgtgtgccacagaaagaaaatgaatgaacagtgctttatggttgcagtgagggaataaaatgtctatatactttcagagtctcaaaatcaaaacaaaacaaaaaaccaaaaaaactgttatttagtaaagggcccctgggttatctggaaaaggctttttttgtgaattgtacatccaaaaaagcaataatgtatatgtgactttaaaaatgtatatttattttaatatattgaatgtgaaacaggaagtgtttatgtctaaataggtggcagtcatatctggataattattttatatggaattattaaaattggccaattaatgagtaggtgaaggggacccttcacattcagtaaaaaggtccctggttctggatagagaagatttagtgtttttgttaactagctcggcgtattacttcaggtatggcaattaaaaaataagaatgttgaaataagtggactcagcctgtgattgtttgcctaaggtaaacaaaatgttgttagtattgttttatggaaaagccagcaatgtcacttcacacttaaattgggtactttaatgatgtcctatttttaaaaattctgtaacaatgggtcagaataattgaggaaaatccaatgggtcttactttgggagaatcatttctatttattgtatttctatattttatcacatagtaattttttaaagaacttggagtagttccaactcgtgttaattcatgctgaggcaaaagtacaaaatgcaaagagacggatggcaaaaaagcatgtgaaaatatgctgatgctcattagtaatcatggaggaaaaattacaactatagtaaggtatagtttcataacatcttattggcaaagatatttaaatctgataatatcaagtgttagggagatgtgggaaaccacttttggtgaaagtgcaaattggttcaactcctttagggcaatatttagcaatatcaagcatttcaattatcttttacatacaataatactgggcaacaaaccaccctaaaacttaatgtcttaaaataagaattatttattgctactgataggctcactcaagtatccatggtcagctagacacgtctaacaagtttaggtaagtcatgcgattgagttttggctggctgaaagctggtctaggatggccactgatacacctggagtctcctccacctgtttcttacatgtatctgttatatccttttaggctagatatatttttggtagttttagataaacaaacatgagaaagtttaattatgcaaaggagcaagtagaaatgcacaatcagttttcgtgcctgtacctggatgacatggctaaagtaagtcacatggccaaactcagaatcagagtacaagagggttacattgttataggcatggaggaagggaggccattaactggggcctatctaattcattaagtagcatggaagatttacatattctatgacccagtgatctcattcataaaatctctgagtcaaggagagatttatgggtttgttgattgtggtattgtttgtaattgagaaaaaaatgtttgaaaaggtgctaaatgtttaccaaaagaagagttaaaaatttgataaagtcatgtaacagatgccattgtagagagaaaataaatgaactggaactacagctaacacaagatatgaatcttcaaactgaaatcttaagtacaagaaagcaagttgagaaaggatatttagaaaatgatattatttataacaatttaaaataaagaaaacacacctacatgcaaaagagattctttgtttatagcaacatatgtagtaaaagaaacacctaccaatttatgtggttacctatgggatggtaggaaaaagaggaagagaagaagagaggaaaggagaatggaggaggacttgattcagttgtatatgcattacgtctttaagaagtttttagtaaatttataggtgctggaataccttctcaattttgaaataattaataatattagcagtttcttttatttcagcccatgtgtgttcttaaatctacagtaactctctttaaacagcatataattggatcttgatttttattcattcagctactctatgtagtttgattgaggagtctaattcatttacatattatataattattaatagaatggaaaaacatagtttatgcaaatggtaaccaaaagagaatggagctcgctattttatatcagacaaaatagactttaagtaaagaaaagttacaagagacaaagaaggatatataataataaacaggtcaatttaataaaaaatagcaattataaatatatatgcatccaacatcagagcacctaaacatatagcaaacatttgcagaactgaaggaaaaaatagacagcaatataataatagtaggagacttcagcaccttatgtttaaaaatgggaagagtgttcagatggaaaatcaataaggaaacagcagacttgaaaaatattgtagaccaaatggatccagcagacatatacagaacattccactcaatagcagcataatacattcttccaaacacacttacaacatttccctggatagattatccaaacaagtcctaacaaatttaagaaaatcaaaaccgtgccaagtgtctcttctgatcacagtggaatgaaactagaaatcaatgtcagaaggaaagatggaaaattcacaaatatgcagacatttaacaacatattcttgcacaatcaatgggtcaaagaaaatatcgagagaactagaaaatattttgggacaaaaacgaaaactcaacatatcaaaacttacaggatgcagcaaaatctttactaagataatttttatagtgataaatgcctacattaaaatatgggggagatctcaaacaagcaaacttcatactccaaggcactagaaaaagaagaacaaactaaccccgaagttagcagaaggaaacaaataataaagataagagcaggtaaatgaaataaaatgcagaaaaacgctagaaaaaaaagaataggggttttgaaaagataaaatcgatacaactttagctagattaaaaactagagacaatttaaataaataaagtcagaaataagagagataatacaaatgatgccacagaaatgaaaaagatcggaagagactactatgaacaattacacactaataaattttataacccagaaaaaattgataaattcctagaaatagacaatctaccaagactgattcatgaaaatgtaaaaaatttgaacagaccaataactagtaagatgattgcgatggttaatactgaatgtcagcttgataggcttgaaggatgcaatattgatcttgggtatgtctgtgagggtgttgccaaaggagattaacatttgagtcagtaaggggggacggcagacccacccttaatcaggtgggcaccatctaatcagcccctggtgaatataaagcaggcagaaaaacgtgaagcaatgagacaggcctagcctcccagcctacatctctctcccctgctggatacttcctgcccttgaagactccaagttcttcagttttgggactcagactggctctcctttctcctcagattgcagactattgtgggaccttgtgatcatgtaagttaatacttaataacctcatatgtatatatatggtcatacatatatgtatatataaatccatacatatatatatatctcctattagttctgtccctctaagagaaccctgactaatacaattattgacaagtaatcaaaaacctcccaacagagatcctaggactagacaacttcactggtaaattctaccagatatttaaagaattaacaccaatccttcttaatctttaccaaaaaaatgaagaggagggaaacacttataaaatcattttatgaggccaacattatcccaataccaaagccagacaaagatgctaaaagaaatctataaattgatatccttgataaccatatataaaaatgctctcaatgaaatattagtggtcaggcatggtggctcatgcctataatcttaacactttcagaggccaaggcaggaggatttctggagcccagaagattgagaccagcctgggcaacatagtgagaacccatctctattaaaaaaataacagtaaaattaaaaaacaaaaccagaaaaaaccaaaatattagcaaaccaaatctaacagcacattaaaatatcagataataagataaaatgagatttaactctggggtgcaaggacaatgtattatataaaaatcaattaatgtggtacatcaaataaattggaggataacaaccacatgatcatctcaatagaggcccaaaaagcatttgagaaaatttaacaccttttcatgataaaaactcttaacaaactagaagcaaaagaaaagttcatcaacataacaaataccatttatgaaaagccctaacatcttactcaactgtgaaaaacggaaagtgtgttatctgagatcaagaacaaggcaagtatgctactcttatcacttgtattcaacatagtcctagatataggaagtcctagatagagcagttaggcaagagaaagaaattaaaaagcatccacgttggaaagaatgaaatcaaattctctttgcttgcagatgacttgatctaatacatggaaaactcaaaaggcaccacgagcatcctcccccaaattgtaaaaactaataaacaagttcaacgtagttgcagaacgcaaaatctacaagcaaaaaatcagttgcatttcttacaccacctagtaactatctaaaaaagaaattaagaaaacaatctcacaatagcaacaaaataataaaataattatgaatgaaaactaaggagacagaagacttattacacactgaaaactataaaatgttgatgatagaaattaaagaagataccaatatatggaaagacatcctgtgtttatacagaaagatttaatgttattaaaatgtctatactatccaaagcaatctacaagtacagtaagatccttatcaaaatttcagtggtgttttttaaacataagtagaaataataattctaaaattcatttcaaacaacaaaggatcccaatagccaaaacagttgagaaagaagaacaaagttggcaacatcgtacttcctcaattcaaaatacattacaaagctatggtaattaaaacaatatggtagtggcataaatacatatttagatcaatggaacagaaaagagagctcagaaataaaaccacacatgtgtggttaactgatcttcagtaaggatgacaagaatatggaatggggagaggacagtttcttaaacaaatggtgtaggaaaactacatatccacatgcaaaataataaaattgaacccttatctcacactagacacaaccatcaattcaagatggattaaagacaaacataagaagaaaacttagggcaaaagctttatgacattggtcttggcaattatttcttgaatatgacaccaaaagcactggcaacaaatgcagaataaactagtggaactacagtaaactaaaaagcttctgcagagcaaagaaaacaattaaaagagtgaaaaagcaatctaatgagtgggagaaaatatttgcaaaccatatatttgataagggggtaaatattcaaaatatataaggaactctttgaaccaaatagcaaaaaaaaaaaaaaaaaaaatgggcaaagaacttgaatagacatttctacaatggctaacaggtatatgaaaagatgctcaacatcattaatcatcagagaaatgtaaatcaaaatcataatgagatattatctcatacttgataggatggctatgattaaaaaacacaaaagttaaaagttggtgagtatgtagagaaattggaaccttgtacagtgttggtgaaaatgtgaaatgatgcaatccttatagaaaacagtatggaggtttctcaaaattaaaaaataaaaataccatatgatccagcaatttcacttctgggtatttctaagatataaatgaggatctcaaaagacatctacgctcttatgttcattaaagcattatttgcaatagccaagatgtggaaacatcctaaatgtccattgataaatgaatgcatagaaaaatgtggtaaatgcatacaacagaatattattcagccttgaaaaatgaaggaaattctgctgtttgcagcaacgtggataaaccttgataacattatgctgagtgtaataagccaatacagaaacaaaagtactgtataatttcattatattatgtatgtatctaaaacagtcaaaaacctagaagcagagagttgaatggtggttgcccagtcgtattagtccattctcatgctgctatgatgaaatacctgagactgggtaacttacaaagaaaagaggtttaattgactcagtttcacatggctgggtggcctcaggaaacttacaaccatggcaaaaggcaccttttcacaggacagcagcacggagtgagtgcaatcaggggaaaggccagacgcttataaaaccatcagatctcatgaaactcactcattatcattggaacagaatggggaaactgcccccatgatccaattacctacacatggtacccccgcccccgatacatggggattattataattcgaggtacagtttggatggggacacagaaccaaactatatcaccagagctgtggcaaggcagaaatgggaacttgctattcaacactatagtttcagttgtgaaagatgattaagttctacagatctgctgtaccacagaatgcctatagttaacaatactgtattgaacacaaaaattttttgggagtagatctcatgttaagtgttcttactgcaattaaaaaataatattaacatttttcaggggatcattctgcaagcataaaacatttagagaattttaccttggaagaaatggagaaagaactctttcaaccatctaagaagtgtgcacgtgtgagttactaaatctaccaatgcaaataaactgacattttcttggaatgacatcagagaagggctagtaatgtatgtatactagtaaactggaccaaagaagttgctattcagcttttaagcaaattctcaaaacagaccagtttctattgaaccaaaacagcccacttatagataaattgagttaaaaaaaaaaatccctgtggcaagcattatcacccaccataacaatggaaataaatgctttgtatatgcaattaggtgcagatccttaatcttactttggtggctccacttcatggagcagttcaaaattggactagggatagaggaatgaaacagcaccctgagagcccaactgaccagtgttactccaaggctggtccatgacgcaggagcactggcatcacccgggagcttaggagaaatgcaatactcgggacctgcctcaggcactctgagtcaagatgcctgagggtggagcccagcaatctgtagcttgagcagcttcccaggtggttctcctacacagccaactttgaaaaccactgctggcctggagcggtggctcatgcctgtaatcccagcactttgggaggccgaggcgggcggatcacgaggtcaggcgatcgagaccatcgtggctaacatggtgaaaccccgtctctgctaaaaatacaaaaagttagccgggcgtggtggtgggcgcctgtagtcccagttacttgggaggctgaggcaggagaatggcatgaacccaggaggaagagcttgcagtgagccgatatcgcgccactgcactccagcctgggcgacagagcgagactccgtctcaaaaaaaaaaaaaaaaaaaaaaagaaaaaaaagaaaaaaaagaaaagcactgccatcacctcttttcagataacaaacagataattgcatttaagcaatgaacacacccacagaatagcagtgacatgtgagtattctactgttactgagaaatactcacaggaggtttctaagggactgtgatgagaaatgggacatcaagacagggatttcagtccttattgcactgaaatatatttattacactagtcatctgaggataataccaagcaaagttggggactgaagaactaagaatgaaactggaagatatatatatttgcacttatttcccatactttgaatgttttcataccttgaatattgctttttcatgtaaaaatatatagctttttgtcatgtaatatatacatcactgtctatttcacagagatttctcacagaaagaaaagagactgctcagcttcaaatcacggttttatttgccttaataaaatgcctgtggaatttaatagaatacggtacataaaaactaatttaacttttattctagtggccacatctataaaagtacaattttcaatgaaggtagaaattctgtaaaatttaatcaccaactattcccaaaatagctgactatgaaatatattataattttcatttatgtgtccatttgtatcttattttacttgccatctatgaattctaaagaacattaatgtcttcagaagagtatattctttgttaaaacacctttatgttctcttatattactattgacattcatatggaaggaaaccaaaataattcaccccacaatatatttctttgacgtattttgagatggctatttagagagcttgcagaccgggatagccctgcaaagctgtcttttgtagaagagatttatacctgtagaaaaactaaagtgaagcaaaaaacagatacaaacagtctttctctgaggctctccctcgtacagatctaggagagagtaatgagagtttgacacctttgaaaatctgactaagaaactttaaccacagactaccatctatttttttgaggactgttatatgtgaggtttcatctgcataacaagaatgcttttgctagctcaaacatttctccttttctatttctgtccgtcagcactctgagtcaagaccctattttttctgtaacctcaagatggttaaaagcattaactatttggacattcttgttgtctttatgttttgtatgtctcctgtgcacatattgtgtttgcctttttttttcctgttaatctattgtctgttttatggactcaaattatcaaagcttcagggaaaagatttaaacttccctacaatatattagtttaacaaatatatattgagcataaagtatgtgccagccaccattcttggtggtcaaaacaaattagcaaccaaaacagacatggctgctgacggcatgggtttacaagctagaccaggtttgggaagacacacaaaatacaaatgcacaattttataatgtcacagggtgataaatgttgtaaataaaattgaagcaaggtgagtgcatcaagaatcatggtagtgctatgagctgggtggctaaagatgttctctgattaaatgactttctagggggaagaaagaagatgaaaggggtggggatggtaatatgggaaaaagggatctcaatgagaaccaatagagagtgcaaagactatgaggcaggaacatgctaggagtttaagaaagtaatggggccaatttggctgaagctggagaagagaggaaagtgccagaggtcagttgcacaaacctgtttgatttggtaacttgtaggcaatcgtctcttttaatgccaaaagagattttggaggcttatctcaaatcaattgacttcatttttatgccatatgcaaattattcagctaacagcaaaataccatttagaggataatttgcactcctgtcagtattagtgaatgctctatctgttgtctgcagtataacattggctgcatggttggggagaccaaaaagaaaatgcatgcactcctgaacggtgtcctcttcctcttttaggagagctctcttgcccatttcccatcgttgtattgaaatttagaaacatgtttttttttgttttttttgttttttttgttttttttttttttcctgggccaagactcagagcagaatgggaatggagggttttataaatgagttataaacacctttattttttaacctgggatgatccttagaattttggtgaaatctttttgacttcacctattacattcctagcgatgaattttttaatacaaggtaaaatgttttaaaatactttggatagtagtgactcagagggcaagtccatgtcacaacgtgtctgtgatgtatctgtagctactgaaaatttgggaggccatggctttcttcaccctggccttcttccagctcctagaacctgtcaggtctcctcctgccacagaacagagcatgtgctgtttttttcctgcttgggtgtatattgcgatgatctggagatgcccagaccacaccccaggcacattcaaccaggatctctggggttcgatccagccatcattactttttaaagttcctatgagatttcagtttgcaaccactggcactttgcttctcgctcacctcccatcgcacttcacccggctcatctttggtttccttgcttaatattagttcctgagacaccttcgctgacactcccctgcaccaaccccaagtcaaatcctcctattctacgtgtaccttccctttggaaggtttatcatagtagtaattttacatttctttgtgacaatatttgcttaatgtttgtcttctccaaagtctttaatagacttgtttactgtgacatctcaaacttggaatcctgttatcttaataccaagaataatggttaaatctgtgttcaattatttccctaccttttgttttcctgaattatcaaatgacctctgtaagcacaggaaaataatgctgattgaggttatttaaggcaatttatttttcccaaacagagctttgtagttcaaactaaagtaattgagaggacaccccataacaggagactctaagtagaatgcacgtccttattttctgctaaacaatttttgtgaacatggactttgctttatgtgcaggaaatcatgcagcgtttaaatgtattttctcctctttgtgagctccatgaaggaagtgactatgtctgattttctaaccattaaataaattcccagggcctaggactcggcacacattaaacattcaataagtgtttgttgaatgaatgaatggggctcgcggaggactcctctagtgtattattttatttttcaggagattctgattcactgaaggaagaatggcagtgattctcattcctggctggatatcagcatcacttgggataggaggtgttgaaaaatactaatgtctagactccaacccagaacaaccccccaaaccagaatgttggaggttggggcttttctacttgaggcctctagttttctattactgattaataaattacctgcttaattgtcagcttaatttagcagcttgaatcaacacagagttattaccccacaggctatgtaggtcaggagttcagacgcatagtagcggcattctttgctcaggtcctcatccagctgaaattaatttgttggccagggctgcagttctctctgtgactcttgattctcttccaagctccctggttgttggcagaagtcatttccttgtggttattggactgaggtccctgttgtcttcctagctgttggcaacaaacgctctcagtttcaggaggccatgctaggtccttgtcgtgtggccccctctatctcagcaacagagaacctccttgctacagaacctgcttcctgcttccaatctctctgacttctcttctgtgaccagtgagacaaacctctctttgtttttaaaaggcttggatgattaagcctggcctatccagataatctcccttgctttaagtcaactgtgccataaaacacgacctgatgacaaaagtgaaatctatcaaattcacattcctggtgaggcaggagaatacacccgggaggcagggaacctaaggacttcctagaactaaatcaaacagaaacacttcagctatgacaggaaatatcctcttcatttacatagggtatacaccaagtaaccaacaggatacctctagagtatattgaaaccacagataattctgtgaccaaggccctcgagccacttgctcatgcctgctcccaccctgtggagtgtgctttcattttcaataaatgtctgcttttgttgcttcattttgctttgtttttgcgttttgtccaattctttgtttaaagtgccaagaaccggataccctccaccgctaacactggggaatatgcagggagtgtgaactgggaatgggtgtacagtgccttttggagactatcttattctgatgaccacaactgatattaaacaactttccagttgagattgagaaccactgggctaaacatatcaaatgtttcaaacggcaaagtattaagtgatctttcaacaaaataaaactaaagtaattgagaggacaccccataacaggagactctaagtataaagcacgtccttattttctgccaaacaatttttgtgaacatggactttgccttttgtgcaggaaatcatatcattctgctgaccacaactgttattaaactttccagctgagattgagaaccattgaactaaacatatcaaatatttcaaatgacaaagtattaagtgatcttttaacaaaataaatttttaaagaaatgcttcttctagatcaaaaaaaaaatcaccaattaagggacatcaatagaaattctaacagagatttacttagggcatgatgtgaatcacagaaggaataccatctgagtatccctacctatggaattgaaattaaaccatttctgaaatctggtgtatctctcaggttccaaccagaaacagcactcacccaagcagtccacttgaagatacttggtgaaaagattgattactgagattaaagttgaggctcagggaaaaatcatgggataaagaaacagaccatcaggaggggaagatagccatcacctgggggaagatttggcatctctggagtccctgaagagtcagaagtgtggaggaggctatagatgggagagacatagctgctgtcagagcccaggtagggaagcaaagacagagcagggagaaattgactttctcatctcccatgtgttgatctcctgccagcacttcctagaggcccggcttaggtggaaattggaagagaggctgtatagagagaaaagcctcctggggtacaaagctgggaggataatgggagaagggaaattggtaggcaaatggagaataaccatcacaccttaaagatgatttttttttttctctaattgaggaaatagctgttgaaattgaaaaacggtgtaacgtgggaattctttatgccctgaaataacttatcagactgatttcctatacgggtaggtgttgccacctaaatcacttattatcagtgctggggcccaggttcccctctggttctatttttaactttttgagttccatgtagattggctgaagggaaatgaggttggcagtgaggtaggaggcaggaaaagagaagttgaagatgtatatgtatcttgttttcaacaccgagaatatatatatgcctttaaaatagtataagcaaaaagttatcttgttaatagaaagagtaattgtgtcaataaattaggacattcctaggtaatatacctcccactaaatatgagtaatcgacttgatatgtaagagtaaaatgaagataaatgatatttttagcaggcatggaactttgaatatttgttaatttctaatttatgctaagatttatagcataggaaaattttaaatcctcttccagcacatttctgatcattcttcattacaatcagaaaaccacctaagcgattgcctagggagagggacaatttctctactgtttttgttttccttcttacctatgcatgtgtttgcatgtttgtctctctcaagtgttgtcaaaataacattgaacatattatacaatcactttaaaattccttagttgcatgttattaatataacactaataagtaataagcaatattcaaattgcaaaatttttaaaatttaaatttaagaatgttgcttcattatatattagccttacctgtttctaaagatataataaaatgttaaaacaaagcaaaacaaaaggtaaaagattgaaatgatgggaggaaattataataggagacaggaatatcagcagaatgaagatcatgacaaatttctggaagacagaaagaagttagttgtaatcatgccaacaggtgatttgaatgagctcagaagttggcagttgagtttggagttcctcattccacggcctgtgaaattggctgatatgtagaacagaaccaaaactggataggaagtagggggctgactgaactgtttgctaaatggcttatagaatgtcttctccagccttccttcatcatgaatgcagttgcaggactcatttccaggataaagccagagtgggaccttctagaaagaagttctccccagcagagcttgggcatccagaacaggggttagctctccagattgggacccatcttattatgccatttggagaagtagtgcagctttctgggtactctgttagtagagtgtggaagagaagcctatcaattgaacatcctcataacatatacagaattttactgagtcttctccttaatgtagaagtcagtaagggctgagcataccccagccagctgctgctgttatcaacatagtcctatgataataaatgactggaaaacaaataatttccatatatttgtaaaaaactagcattgcaaaggaaaaagatgcaaaaaagatcaatagactcaaggggatacatacataactcagaagagatacaaacttatggttaaaatcttagagatatttgagaggcaccgataaggagagaaatgtccttatattgaatccataattaaataaattaaatccattagtaaaatatttttaaaaagaacctttaggcaaatacactgtcaccagaaaattcctccatatatatgaaagaaatgatacatattttatataaacttaataaaaaaggaaacacttcgagactcatttattaggttagcataactttgataataacacttatcagtcatactccagtgagagagaaataacaggtcagtatcttatatgaaaatatatgaaataatcccttaaaagttagcaaataatatgtacaccaaacatcagattacgtaagcatgtaaagcaaacattgacagaactgaagtaagaaatagacagcaatacaataataaaagaaaacttcagtaccccactttcaataacagaccaatgagagaaaaaattaatgagaatagcagacttgaacaactctttagaccaaatgaacctaacagacatatgcagaacatcctactcaacatctgcagaatacacttttttcttaagcacacatgaagcattatcaaggatagatcacatgttcagtcacaaagtaagatctaacaaatttaagaagatcaaaatcatatcaaggatattttccaaccacaatgctataaaactggaaattaataacaggaggaaagctgaaaaatgtagaaattaaacaacatactcctgaacaattggtcaaagaaaaaatcaaaagggaaatttaaaaatatcttgaaagaaacaaaaacacaacatatcaaaacttatgaaatgcagtgaaagcattacaaagggtgaagtttatattaataaatgtgtacattacaaaaaaatctcagataaatgacattttacctcaagaaactagaaaaggaacgaactaacctcaaatgagtagaagaaaggaaataatatcagagcaaaacctaaatgaaatagaaacttaaaaaacaaaatatcaatgaaattacaagtttttttttaaaagataaaattgacatacctttaggtagtctaacaaagagaaaaagaaaagatacaaatgaaaaaaacaacattttatgaagctggccagcattaccctgacagcaaagccagacaaagacactacaagacaagcagtattcctgataaacatagatgcaaaaatactaaacaaaatactagaaaaccacatttgacagcacattggacgtatcattgagatttaaccctgggatgcaggaataactcaacataaaaatcaattaacatgatacctcacattaacagaatgaaggataaaaactacaagatcatattaatagatgcagaaaaagcatttgacaaacttcaacaccctttcatgataaaataaattctcaacaaactagaaataaaagtccctcaacataataaagattatatatgaaaagtgcacaggcaatattatattcaaataaacaattgaaagctttttctctaagatcagcaacaaggcaaatatacttattcatcacttctattaaacatagtactggaagtcctagaacgagtacttaggcaaggaagaaataaagatactcaaatcagaaataaagaagtaaaagtatctctgtttgaagatggtataatcttatgtgtagaaagccctaaagagttcaccaagaaaaagttggtactaataaatgggttcaacatagctgcacaatacaaatcaacatacaaaattcagttgcatttcttacactaacaatgaactatccaaaaaagaaattaagaaatcaatcctatttacaataacaacaataagaatacaataactaggaataaacaacaaaggaaacaaaaaacatacactgaaaactgtacaatagtcatgaaagaaagaaaataaatagacatcatgtgttcatagactggagtacacaatattgttaaaatacctatactaaaagcaacttacagattcaatgtgatatgtatcaaaatcccaatgacatttttaacagaaatagaaaaatcaatcctataattaatatgaaaccacgaaggactccaaatagctgaaacaatcatcagaaagaacaacaaaggtggaggcatcatacttcctgatttcaaaatacattacagaaccaaagtaattaaaacagtatggtaccagcataaaaacacatatttagaccaatggaaaagagagcccagaaataattttccacatatacagtcaactgatattcaacaagagtgccaagaatatacaatggggaaagaaaggatagtctttaacaaattgtgttgggaaatttggatatccacatgcaaaagaatgaaatcagactcttatctcacaccgtacacaactatcaatcaaaatggatgaaacacctaaatataagacttttatgtgtaacactcctggaagaaaacaaaggaaaaattttatgacatcagtcttggcaataattttatggctatgacaccaaaatacaagcaacaaaagcaaatatagatagatggagctacatcaaactaaaaagttgcagagcaaaggaaactgtcaacagagtgagaaggaaacctgtggaatgggagataaatttacaaaatgtgcatgtgatgagggataaatatttaaaatctacaaagaacttccacaactaaacagaaaaacaaaacaaaacaaaacaatctgattttgaaactgggcaatggtacatttgtgtagtgcagataagaggaaaataaaagaaaaaatagagacaagaaattggagaattgactttgaatggattttttttttccaaaaaagacataaatggccacaggtatatgaaaagatgctcaacatcattaatcatcattgaaatgcaaattacaaccactatgagatatatcatctcacatttgttaggtttgccatttttacaaaaaaatgacaagttttcatgagaatgtggatgaattggaactcagacactgttggtgggcatataaaatagttcagttaatatgaaaaaccatatggaggtttctaaaataattcaaaatagaattaccatataatccagaaatcccacttctgtgtatttttccaaaagaataaaaccaggatctcaaaaagatatatgcatcctcatgttcagtattattcacaatagccaagttgtggaaacaatcctaaacgtccatcgacagatgaatggattaagaaaatgcgctatgtgtgtgtgcaatgaaatattattcagtcataaaaaggtaatcctactatatggaacaatgtatatgtacctcgagaatattatgctaaatgaaccaagccagtaacaaaaagagaaatactccctgattccccttatataaggtaaatagtcaaattcatagaagcagaaagtggaatagtggttccctgaggctggcgggaggaaaaaatgaaaacaaaataactttgcattcataaaaaatctccccaaacccagggttttccactgaactatcttcataatatttatttctatgaatactggaataaaaaatgaaaacaaaattttatacaaaaaatatattcatgcattaaaagttgtatgaaataaaaaagtaaacaatgtgtataaatacataataggtattgtgagcaagttagatttattccaggaatgcaagatactttaaacgcttaccaattaatgttttctataacattaacagaatcaaggagaaaaactaaataatcacttcagtcaatgccaaaaagcagtttataatattcattctcttaaatgctgcttcctgatttatgataaaaatctttagcaaactaggaataaaaggaaacttccttttttttttgtgagacggagtctggctctgtcacccaggctggagtgcagtggcgcaatctcggctcactgcaagctccgcctcccgggttcacgccattcaaaaggaagctgtcttaaatctgcaccttttaagctttcttaaatcctaggtatctgggaaagaaacttgagatcaggattaagacgagaatatctgactatcattatgtatttttaattttgtacaagaggttctaccaagctgcaacaaggcaaaaaggaacaaacacacacatagtttaaaattggaaaggaagaaataaaacttattattaggaaacaacatgtctttattggtttttgtgtgtgtttgtgtgtgtgtaaaacatttaagggaatcttcagaattaacatttagtttggtcatgggatataaggtcatcttaaaatcattgtgtcatacacaccagaagccaatatttagaaaataaaacttaaatatgtgttatcatttataaagcatcaaaagtatcaaatgcctagactaagtctaacaaaaattgtgcaggacatttacatagaaaattataagatgttattgcttaaaaataaactacacaataatacataccattttcataaaagagaaatattagtatttttaaggtattaattctcctcaaatacatctatatatatatttacctatttacattccttctgccgtgattgtaagtttcctgaggcctccccagccatgtgcaactgtgagtcaattaaactgctttcatttatatctattttatagatacatctatcaaatatatctattttaatctatttacatatatatgtaaaatttctatcaaaatcataggaagttattttatggaaatttgcaagttgattccaaaatttatatggaaaagtaagatgtcaaaaataattaaagctattttgaaaagttaatactgttggtgcacctacagtaccaaatctacctatactatcagtataaattaatcataatttaggaatatgtagcatgatgccaggatcaactaatagaacaaaggaacacagtagagtccagaaagacccatgcatcaattgacttaatttatgtcaaaggtggcaatgcaaactaaaggcaaaggacattttcctgttaataagtagtattgaattgattggtcattaatatggaaaatatgaacattgacttctacttctcactatacacaaaaatcaagtccaggtgattatagatcaaaatatgaatgataaagcaacaaaacttctaaaagacaacaaaaaatattatcttcatgaccaaagtgtaggtaatgctttcttcaaggggacactaaaacattaaccataaaggaaaagactgataaaataactcttcctgttcattaaaacatatcattaaaagggtataaaaaacaaatcaaaaaatgggagaaaataattgccacacatataaccatctaagggcttctaaccagggtatacattccagttggaatagctacaattaaatacattggctataccaagtgttggtgaagatctgggggaagagaactcccatgcattgctgataacagagatactgataaaactgctttggaaaatacttggaaatatcttctagtatttattataaacacactctattaccctaggtggagtaaaatagaacacattaaaaatgtgagtatatgtgcaccaaacaaaaatgttcttaacaactttatttataataggcaaagactgaaataaatccgaatgagtatcaacctaatttcctgtatattgatataataaataatattcagatattgatgtgaatagattattttgtaagcaacgatgtggatagtctcattaacataatattgaatgacagcagtgagtcacaaacaatatatgttgtttctattttgtatgaatttcaaaaaatgataatctgttgtatgatattcaaagtcaggtcagtgatgcttcctgggaaagaggggtcggtaattgagaacagggcacaagaggaaacttctgaggcacagatattgttttatttcttgactaatgctgtgattatgctgataagattattttgaataactcatcgagctataatttgtccactttttgtatgcatattataattaaataattttaaataagcacaactgcattgcacactagagataaagatttagattgacaataacattctcacttcagcaatcttatatcttaaaaaatgcttcaaaattctgatgggcaaaaaaacctctagaatttcctagaattctatctaggaaatgaaagatatatttatttttgtgatgaactcattatattcatcttttatacactattcctaaaagaattcaggagaaatacaaacgcctgaggaaacaatagaactaacccaggagaacaataaaaagaaataagaagacagctgtacttacggcctcaaagcattttatgtcatccaacaagtagcatgataaagtggatgctttttggaatgtgataaatacaaattctttctgacaacaagaaaaaaataaacaaatacaatgaaattctccaggaaatttacaaagttgtataaaaaaatcatgttacacatttgaagaaaaacaaaatgtaccttatcttgaacaagtgatggaatgtaatagaatacatttggcattgacatttgaaatattctctccttcaagtgactcagcctaaaggacacactacctctttgtgagttaaagcacaacaattgattactgcatactcattgcagtattaatactgtttatcagttcataattttcagaaccaaactatggatgcaaaactttattaaaatagaggtcagactataaatgctatacaatgtaacattttttttttattattatactttaagttttagggtacatgtgcacattgtgcaggttagttacatacatatacatgtgccatgctggtgtgctgcacccactaactcctcatctagcattaggtatatctcccagtgctatccctcccctctcccaccaccccacaacagtccccagagtgtgatgttccccttcctgtgtccatgtgatctcattgttcaattcccacctatgagtgagaatatgcggtgtttggttttttgttcttgcgatagtttactgagaatgatgatttccagtttcatccatgtccctacaaaggacatgaactcatcattttttatggctgcatagtattccatggtgtatatgtgccacattttcttaatccagtctatcattgttggacatttgggttggttccaagtctttgctattgtgaataatgccgcaataaacatacgtgtgcatgtgtctttatagcagcatgatttatagtcctttgggtatatacccagtaatgggatggctgggtcaaatggtatttctagttctagatccctgaggaatcgccacactgacttccacaatgtttgaactagtttacagtcccaccaacagtgtaaaagtgttcctatttctccacatcctctccagcacctgttgtttcctgacgttttaatgattgccattctaactggtgtgagatggtatctcattgtggttttgatttgcatttctctgatggccagtgatggtgagcattttttcctgtgttttttggctgcataaatgtcttcttttgagaagtgtctgttcatgtccttcgcccactttttgatggggttgtttgttttttccttgtaaatttgtttgagttcattgtagattctggatattagccctttgtcagatgagtaggttgtgaaaattttctcccattttgtaggttgcctgttcactctgatggtagtttcttttgctgtgcagaagctctttagtttaattagatcccatttgtcaattttggcttttgttgccattgcttttggtgttttagacatgaagtcctcgcccatgcctgtgtcctgaatggtaatgcctaggttttcttctagggtttttatggttataggtctaatatttaagtctttaatccatcttgaattgatttttgtataaggtgtaaggaagggatccagtttcagctttctacatatggctagccagttttcccagcaccatttattaaatagggaatcctttccccattgctcgttttgctcaggtttgtcaaagatcagatagttgtagatatgtggtgttatttctgagggctctgttctgttccattgatctatatctctgttttggtaccagtaccatgctgttttggctactgtagccttgtattatagtttgaagtcaggtagtgtgatgcctccagctttgttcttttggcttaggattgccttggcgatgcgggctcttttttggttccatatgaactttaaagtagttttttccagttctgtgaagaaaggcattgatagcttgatggggatggcattgaatctgtaaattaccttggccagtatggccattttcacgatattgattcttcctacccatgagcatggaatgttcttccatttgtttgtatccttttatttccttgagcagtggtttgtagttctccttgaagaggtccttcacatcccttgtaagttggattcctaggtattttattctctttgaagcaattgtgaatgggagttcactcatgatttggctctctgtttgtctgttgttggtgtataggaatgcttgtgatttttgcacattgattttgtatcctgagactttgctgaagttgcttatcagcttaaggagattttgggctgagacaatggggttttctagataaacaatcatgtcatctgcaaacagggacaatttgacttcctcttttcctaattgaataccctttatttccttctcctgcctaattgccctggccagaacttccaacactatgttgaataggagtggtgagagagagcatccctgtcttgtgccagttttcaaagggaatgcttccagtttttgcccattcagtatgatattggctgtgggtttgtcatagatagctcttattattttgaaatatgtcccatcaatacctaatttattgagagtttttagcatgaagggttgttgaattttgtcaaaggccttttctgcatctattgagataatcatgtggtttttgtctttggctctgtttatatgctggattacatttattgatttgcatatattgaaccagccttgcatcccagggatgaagcccacttgatcatggtggataagctttttgatgtgctgctggattcggtctgccagtattttattgaggatttttgcatcaatgttcatcaaggatattggtctaaaattctcttttttggttgtgtctctgcccggctttggtatcaggatgatgctggcctcataaaatgagttagggaggattccctctttttctattgattggaatagtttcagaaggaatggtaccagttcctccttgtacctctggtagaatttggctgtgaatccatctggtcctggactctctttggttggtaagctattgattattgccacaatttcagctcctgttattggtctattcagagtttcaacttctttctggtttagtcttaggagagtgtatgtgtcgaggaatttatccatttcttctagattttctagtttatttgtgtagaggtatttgtagtattctctgatggtagtttgtatttctgtgggatcggtggtgatatcccctttatcaatttttattgcgtctatttgattcttctctctttttttctttattagtcttgctagcggtctatcaattttgttgatcctttcaaaaaaccagctcctggattcattaattttttgaagggttttttgtgtctctatttccttcagttctgctctgattttagttatttcttgccttctgctagcttttgaatgtgtttgctcttgcttttctagttcttttcattgtgatgttagggtgtcaattttggatctttcctgctttctcttgtggacatttagtgctataaatttccctctacacactgctttgaatgcgtcccagagattctggtatgttgtgtctttgttctccttggtttcaaagaacatttttatttctgccttcatttcgttatgtacccagtagtcattcaggagcaggttgttcagtttccatgtagttgaacggttttgagtgagtttcttaatcctgagttctagtttgattgcactgtgggctgagagatagtttgttataatttcagttcttttacatttgctgaggagagctttacttccaagtatgtggtcaattttggaatactgaaaaaaatgtatattctgttgatttggggtggagagttctgtagatgtctattaggtccgcttggtgcagagctgagttcaattcctgggtatccttgttgactttctgtcccgttgatctgtctaatgttgacagtggggtgttaaagtctcccattattaatgtgtgggagtctaagtctctttgtaggtcactcaggacttgctttatgaatctgggtgctcctgtattgggtgcatatatatttaggatagttagctcttcttgttgaattgatccctttactattatgtaatggccttctttgtctcttttgatctttatcagtttaaagtctgttttatcagagactaggattgcaacccctgcctttttttgttttccatttgcttggtagatcttcctccatccctttattttgagcctatgtgtgtctctgcacgtgagatgggtttcctgaatacagcacactgatgggtcttgactctttatccaatttgccagtctgtgtcttttaattggaacatttagtccatttacatttaaagttaatagtgttatgtgtgaatttgatcctgtcattatgatgttagctggttattttgctcgttagttgatgcagtttcttcctagtctccatggtctttacattttggcatgattttgcagcagctggtacctgttgtttctttccatgtttagtgcttccttcaggaggtcttttagggcaggcctggtggtgacaaaatctctcagcatttgcttgtctgtaaagtattttatttctccttcacttatgaagcttagtttggctggatatgaaattctgggtcaaaaattcttttctttaagaatgttgaatattggccccaactctcttctggcttgtagggtttctgccgagagatctgctgttagtctgatagggtaacccgacctttctctctggctgcccttaacattttttccttcatttcaactttggtgaatctgacaattatgtgtcttggagttgctcttctcgaggagtatctttgtggtgttctctgtatttcctgaatctgaacgttggcctgccttgctagattggggaaattctcctggataatatcctgcagagtgttttccaagttggttccattctccccatcactttcaggtacaccaatcagacgtagatttggtcttttcacatagtcccatgtttcttggaggctttgctcgtttctttttattcttttatctctaaactttccttctcgcttcatttcattcatttcatcttccatcactgataccctttcttccagttgatcgcatcggctcctgaggcttctgcattcttcacgtagttctcgagccttggttttcagctccatcagctcctttaagcacttctctgtattggttattctagttatacattcttctaaatttttttcaaagttttcaacttctttgcctttggtttgaatgtcctcccgtagctcagagtaattcgatcgtctgaagccttcttctctcagctcgtcaaagtcattctccgtccagctttgttctgttgctggtgaggagctgcgttcctttggaggaggagatgagctctgatttttagagtttccagtttttctgttctgttttttccccatctttgtggttttatctacttttggtctttgatgatggtgatgtacagatgggtttttggcgtggatgtcctttctgtttgttagttttccttctaacagacaggaccctcagctgcaggtctgttggagtaccctgcagtgtgaggtgtcagtgtgcccctgctggagggtgcctcccagttaggctgctcgggggtcaggggtcagggacccacttgaggaggcattctgcccgttctcagatctccagctgcctactgggagaaccactgctctcttcaaagctgtcagacagggacatttaaatctgcagaggttactgctgtctttttgtttgtctgtgccctgcccccagaggtggagcctacagaggcaggcaggcctccttgagctgtggtgggctccacccagttggagctgctttgtttacctaagcaagcctgggcgatggtgggtgcccctcccccagcctcgctgccgccttgcagtttgatctcagactgctgtgctagcaatcagtgagactccgtggggtaggaccctccgagccaggtgcaggatataatcttgtggtgcgccgttttttaagcccgtcggaaaagcgtaatattctggtgggagtgacccgattttccaggtgccgtccatcacccctttctttgattaggaaaaggaactccctgaccccttgtgcttccccgagtgaggcaatacctcgccctgcttcggctcacgcacggtgtgcgcacccactgacctgcgcccactgtctggcactccctagtgagatgaacccggcacctcagatggaaatgcagaaatcacctgtcttctgcgtcgctcaggctgggagctgtagactggagctgtttctattcggccctcttggctcaatgtaacattgttaaagccatacaaggcttggaaaattctgacaaaggggtagcggtagaggctgtgaaagccaggttaaggatttcacaacattaaatacttcatctcatatagcaaggcatcaagagctgcagcttaaagctgatgggtttataatagagatcttagtacatgatgtaaaatctttacaaatttaatttaaaaaataagaggaacaaggtaggaaaggtatagagaaaatatgctacatggtccttgtgtattgagcctcaccagatactgcttagtattgataaatccagacataaaggcaggattttacttagtgttacctctaaaagacgaaacacagaaccagtcgaaaattcttgtctattaaggcagggtatggaggggtgagagaatgtgaaagatatgggaaaaagtcttgttttttttgagacaaggtctcgctctgttgcccaggctgtaattcagtggtgtgatcatggcttactgcagccttgacctcctgggctcaagtgatcctcccacctcagtctcctaagtagctgggactaaaggcatgtaccaccgcatttgactagtttttaaacatttttttttttttcgcagagacagagtcttattatattgcccagactggtataaaactcctgggctccagtgatcctcccacttatgtctcccaaagtgttaggattacaggtcttagccaccatgtccagtcctgagaaaagtcgtctcatattgtacctctttgttttctgatgttttatttctatgtgatcatattacatctgttaaaataacaactaataaaagtgctcaattaagataaaataactgttacattatctagaagaagcagaaatatttaaataacccatataccatgctcatgtttagaaattccatgctaaagacctaattttgctaccactgtgaaatgtccctcattttgttttatgtggtaaattgcaaaattagccacattttgcagcttttaccatatggaggtggattttttcccatcccctaaaatctggctggtattgtgacttgctttgaccaatggaatggtaacaaatttgatgcaagagggttggaaattacttacaaattgaggtttccctctcttgctgctcttgaacttgagacttctatgtgaagaaatctgggcagggtgtctgaaggatgataagcacatggtaccctagagcaggccaaaccccaggaaatgagtggaggctatgcaagattattcagctgtcagctgacctgtgaactcatcacaaactcctgtgtgatccagtccaagatcactttaataatctccgataagataactgtctagtcatcctacaaaattgtaggctaagcaggcaagcagtcattgttttatgttttgcagtggttctttggagtagaagctaattgataaatttcttttaagatagggtcattttgactattaacatctcataagaagattgtagatagtaacaagatcatattaaaatagattcttgagagatgactaaataaaaggtcatatatctcctaccttcatgacattggctaggcaaagtttgacataataccaagcacaagtgccaaaagaaaagagagatatattagacatcatcaaaattaaatacttttgtgtttcaaagggtactatgataaaagtaagaagacaatcttcagaataggagaaaatatgtgcaaatcatatactgatcaggttgtggtatccagaatataggaacaattcttaaaacacaacaaaagacaacccaattgaaaaatgagcaaagactcttaataggcatttctccaaacaagatgcaaatagtcaataagcacatgaaaagatgctcaacatcattagccagcaaggaaaggcagatcaaaatcataatactataacacttcatacccactaagatggctaaatttaaaaagacacataatgacaagtgttcgtgaggatgtggagaaatgagagtccttatacattgttgtcaggaatgtaaaattgcatcgccgcttagaaaaacaatctggcggttcctcaaattgttaagcaaagagttaccgggcggtccagcaattccactcctacgtatgtacccccacaaaatgaaagtataggtctacacaaaagctcatatatcatggtcacactagcattatccataacagccaaaaagtagaaacaacccaaatgtccatcaactaatgaagagataaacaaaacgcagcatatccatacaatgtaatattatttggtcataaaaactgaggtaccgaaacctgatataacatagacaaaccatgaaaacatactaagaagccactcacaaaaggccacatattttgtaattttacttgtaggatatgccaacaataggcaaatccatagagataaaaaacagtagttgccaggtgctataggagagggaatgagggatgtgggatttcttttgggggtgatgaaaatgttctaaaatgagattgtggtgatggttgcagaaatctatgaatagacgtaaatcaactgagttgtaaactaaaattgagtgaattatatagtatgtgaattatatcccaataaaactgttatgttttaaaaattatatcagatgacttacttgacctcaagtgaataaattaccaaaactgtaatgtccttgaccaaataaaattgaatttgatgtatttaggtatttaagagacagccaaggaatctttcattttcagtcaaggataaaaatctagatataataaactcaaatctgctaactcaggatgaacttcctgttcctgaatacttagaggagaaagtgtttggcattctatccttggtaaagaaacagttacactgttctaagtttggcttgttatatatttctttctttcttttttttttctttaagatggagtcttgctgtgtcgcccaggttggagtgcaatggcacgatctcggctcactgcaacctcggcctcctgggttcaagcaattttcctgcctcagcctcctgagtagctgagatgacaggcgcgcgccaccatgcctggctaattttttgtatttttagtagagacggggtttcgccatgctggtcaggctgatctcgaactcctgaccttgtgatccacccgcctcggcctcccaaagtgctgggattacaggcatgagtcactgtgcccggcctatatattccatatctgggttgtccaagctattatttgggaaaagcatcaagagaagttatgaggattttaaaaatacgaaatataaataaaaacaaaataaaagtgagctttttaaagtacttttccccaacatactcatgtgaaaaacacatgcttatatttcatctttgtttctttcttcagcttgcccaggaaacaggcaaggtgtgatactttaatcatcgatgttgctttaatattctaatgacatttttttttgctctaaattctgcacaatttctcaaacagacactttaagaagaaatgagagaaactttatcttgttttacatgagaaattcatcagatgaattgataaataataaaaatagtttatgggaaggggtgacgagtgggttgtaaggagaaataactgaaatcaaattactcattatttttagtgttaaataagataattcaaaaagtataatcagtaactcgattgagttcaaattacagttatgtatttaggttaatttccaatttatgctcattcatttttttccttcctacattgtaaacttctcaaatccaagtaagaaataactagtttcttacctaaagtatcagtaaaagtcacacagtgcttaataatgtcaacaaccacttgaattctgcactagaagaagcattcccatttagtcttcaaagcgttgtcagggatagaggtgtaggattatttcacatcacaaatgaagaaatggagcctcatacagatcaaattattaaatcattactgaaaaattgaatatagatagaggacttgaatctaagttatttgctgagtcatttatttaagaatttcactgttgattgacctaatgatgatcctataccatgattgacagatttggccatggatctgctttctaactcactcaaaactctgggtatctgtgtacaaacaggtaagtctaagtttcctggggggcaacagagtgccttgagtgcattctaaacacttccactcgtgtacaagtgcatttgctaccctattcgtgaacctagagactttgcctcttgatggagctgaatgttttcctctaactttcattctcatggatgtgtttcatccatattctctacctatggtcatgctgttccatttttaaaaaactatcttcccctgtatgaacccaaatctctccatatatgtcattttcattcagtaactctatgtgcaatcttcagagctatgtatcaagtctgttctttttctcatgataaatttcaaatgttcaaaggtagcttttacatgtagtcctttagataagttattttctacactaagtagaatgcttttcaacaagttttgataaattgtgcagtaaatgaatgtattcattcctctttctatgtgatgatatattggaagtaactattttttatttcaaaaggttttgggggaataggcagtgtttggttacattgataagttcctttgtggtgatttctgagattttggtgcacccatcactagagcagtgtacactgtacccaatgggtagcattttattcctcaccctcctaccacccttccccctgatgccccagaatccttatccctttgcatccttatagcttagctcccacttataagttagaaaaaacaatttttggttttccatccctgagttatttcacttattagaataacggtctccagctccatctagacttctgtgaatgccattatacatcacattttctttatccatttgttgattcatggtcatttgagctgcttccatatttttgtaattgtgaattgtgctgctataaacatgtgtgtgcaagtgtcttttttatattatgacttcttttcctttgggtagatacccagtagtgggatcgctagaccaaatattagagtctacttttagttctttaaagaattttcattcatactgttctccatagtggttgtactggtttacattctcaccagcagtgtaaaatattcccttttcaccatatccacgccaacatctattatttttgtgatttcttaattatggccattcttgcaggactaagatggtatcacattgtggttttgatttacatttctctgaaaattagagatgttgaacattttttcatatttttttggccattcatatatcttcttttgagaattttctattcatattctcagcttagtttttgatgggattattattttttttcttgctgatttgagttccttgtacattctgagtattagccctttgttggatgcaaagtttgcaaagattttctcccactcttgagtcatctgtttaccatgctgactatttcttttgctgtgcagaagctttttagtttaattaagtcccatttatttatttttgtttttgttgaatttacttttgggttcttggtcatgaagtctttgcctgaggcaatgtctagaagggctttttctgtgttatcttctagaatttttatggtttggggtcttaggtttaagtttttgatccatcgtgagttgattcttgtataaggtgagaggtgaggatccatttttattcttctacatgtggcttgccaattatcccagcaccatttgttaaatagggtatctttccccacttttatgtttttgtttgctttgtcaaagatcagttgactgtaagtatttggcttgtctcaatttcattctacggggtttgggttgtgttgactctaccatcagattcattttccttgcctggctaagcagtgggttctttctttctatctgtagggatggatgcaatccaagccaggccaattaaaatcaattctaggacttttgttgcaaatattaagaaaaatgaatctttcttcctactggtagtgctaagaaaaaatggtgatatatgattctagagctcctaggaattaacaactgcgaagagactgcccaagagtggagctcacacagaggaaagcagtgccaagaaaagagacagagattgagaacattacttttcatatacataagctaatatggtcttttttaaaagtgttaagaccattttatttgcattttgtgaattgtttccaaaatgatctttttgaaaatctattttttatttttattgatatatcatagttgcacatattttgggggtatatataatattttgatacatgtatacaatatgtaatggttaaattaagtaattggattatccatcatctcaaacatttatcacatttatcttttctttgtgttgggaacattacagttctcctagctattttgaaatatacagtaaattatttttaaactataattttactagtctgctataaaatgctagaatttatttcttctaactgtatttttttacccatttaccaacttctattcatgtcctcctccccacttcctttcccagcctccagtaaccaccattctattcactgtctccatgagagccactttttagcttccagttgtgagtaaaaacatgtgatacttgtctttctgtggctggcttatttcccttaacataatgaactccagttaaattcatgttactgcaaatgacaggatttcattaattttatggctgaatactattccattatatatatatactatatatgtatgtatacattcatgttactgcaaatgacaggatttcatttttcaatggctgaatactattccattgtgtatatatacatttatccattgatggacacttggattgcttccaagtcttggctattgtgaatagtgttgttataaacttaggagacagatatctctttaatatactgatttcttttccttaggatatgtatccatcagtggtattgctggattatatagtagttctatttttagctttttgaggaacttccatactgttttccataatggctgtactactttacattctcaacaacagcatatgagcgttcccctttttctgcattgtcactagcatttgttatttttgtctttttggtaatagccactgtcattagggtgagataatatcttattcgggttttgatttgcatttccctaatggttagtggtgttgagcagtttttcatatacctgttgaccagttgtatgtcttgttttgaacaatgtctattcagatattttgaccatttttaaaatgggttatttgtttatttcctgttgagttgtttgagttccttatatattctggttatgaatctcttattggataagtagtttgcacatattttctcccattttttttacattgtctcttcactttgttaattgttacctttgctgtgtgaaagctttttaacttgaggtaatctcatttttgtttttgttgacagggcttttgaggtcttatccaaaaaaatctttgcccagaccaaagtcctgaagcatttcccaaatgtttttagtagtttcataatttcagattttatatttaagtctttaatccattttgagttgattttcttatatggtgaaagatggaaatctagattctcctgcatttggatatccagttcctagcaccatttaactatcccaaggacaaaaaaccaaacatcgcatattctcactcagagatgggaattgaacagtgagaacacttggacacaggaagggggacatcactcaccggggcctgttgtggggtggggggaggggggagggatagcattagaagatatacctaatgtaaatgacgagctaatgggtgcagtgcaccaacatggcacatgtatacgtatgtaacaaacctgcacgttgtgcacatgtatcctagaacttaaagtataattaaaaaaaaaaaagactttccttttcccaatgtacattcttggcacctttgtctaaatgagttggcagtaaatttttggatttgtttctgggttatgttttattccactgttctatgtatttgttttttctaccagtaccattctgttttggctactatagctttgtagtataatttaaaaccagatattgtgatgtctttagctttgttcttttttctaaggatttatttagctattctgggtcttttgttgttccatatgaattttagaattgtattttctattcctgtgaagaatgtcattgttgttttcatagagattgcattttaacaatattaaatcttccaatccatgcacatcttttcgttttattttgtgatctattcaatttctttcatctgtgttttctagttttccttgtagatatctttcacttttttggttacatttttcctagatatttttatagctattttaaatgagattgctttcttgatttctttttcagattgatcatttttaatgtatagagatgctactgctatttgtatgttcattttgtatcctgcaactttactaaatttatcaattgagtgttttggtggaggctttagtttttttctaaatataagattatgtcatctacaaacaagaataattttacttcttccttttcaattttatttatttctcttaccaaattgctctggctaggactcctagtactatgttataataaaagtgatgaaagtggtcatccttttcttattccagatcttaatggaaagggtcctatttttccccattcagtatgagaatagctgtgggcttgtcatatatggccttttttgtgttggtgtatgttccttatgtactcagttgttgacagtttttatcatgaagggatattgaattttatcaaatgctttttcagcttctactaaaatgatcatataacttttgtccttgattctgtttatgtggtgtatcatatttattgatttgtatatgttgaaccatccttgtagccttggaatgaatcccatttgatcatgatgaatgatgttttcatgtgttgttgaatttggtttgctagcattttgttaagaatgataaatctatattcatcaggaatattggcctgtagtttttcttttcttatatctttgtctgattttggtatcaaggtaatactgacctcatagatagagtttgcagatattccttcctctttaatttttaaaaatagtttgagtcaaatttgtattagttcttctatagatgtttggtagaattcatcggtgaagccattaggtcctgggcttttctttgatgggagaggattactgcttcaattttatttctcattaatgttctgttcaggttttcagtttgtggttcagtcttggtaggttgtatgtatccatgaatttacccatttttgctaggtctttctgtttgttggcatttagttgctcataatagtctctaatgatttttccttcctgtggtatcagttgtaatgtttcttttttcatctctgattttcttgagtcttctctgttttttcacagtctagctaaaggtagttgattttgtttaccttttcaaaaagccatttttttgttttgttgatcttttatgtattttttaatctcaattttatttctgctctgatctctgttttttatttttctagtttgatttgtgcttatttttctagttcctttagattgataggttattttggagtctttcttctttttgatgtgggtatttattgttatatactttccttttagtacggcttttgatgtattccgtaagttctggtatgttgtgcttccatttttatttgtgtcaagaaatttttaaattttcttcttaatttcttcatggcccattagccactcaggagcatgtttttaatttccatgtatttgtacagtttctaaaattcttgttattgatttgtagttttatttcattgtggtcagaaaagatatgtgatatgatttttacttttttgaatttgttgtaatttgttttgtgccataacatatagtctatcctggagaatgttccatgtgctgatgaaaatagtttgttttcagtagcggttggataaaatgttctgtaaatgtctgttaggtccatttggtctagaatatagtttaactattgtttctttgttgatattctgcctggataatctgtccattgccaaaaatggggtgttgaagtcccatgctataattgtgttgcaatctattttctgctttagatttattaatatttgatttatatgtttgggtgctccatataaatttactattgttatatcctcttgctaaattgacccctttcttgttatataatgaccttctttgtctctttttacagtttttgagttaaatctatcttatccaagtatagctagtcccgttcttttgttggtttctgtttgtatgaaatatcttctgcatcccttcactttcagtccatttgtgtccttataggtgaagtgagtttcttgtaaggagcatttagttagttcttgtttttttaatccattcaaccagccattctgtcttttaattggagaagttagttcatttacattccttgttattattgataagtaagacattactactgccacttggttacttgttttctagctgttgtgtaacacctgccttcctttttacctttcttactatcttcctttgtggttaagtgattttctcttagtatgttttaattcattgctttatatagattcttcaccatcttggtcattattatgaacactttggctatgataatgtaagagaagcatgcctccaactaatactcacattattaacatggtgattattatgtgaatagaaaagtgggcatttaattggaggataaaattgaataagtgttttagaggtagtctttgaatcttgattgccttgctaagactttagactttattttatacaaaaagacaccattaaagtggtttttgttgctgttgtttagttttttttttttatttttttattttttttttttatttaagaggagactgatgttatgcaagctgtgttcctgtgcttactgtggttaaactaaaaacctctaggggcaaaggaaggttatatttaaaaacatagggcttgaataggaacagaagttactcaggcaatgaagcagaaaagcagagaaaagatgaacctggtctccagcactttaaaggaagaaataataaatgtgttggtaaaagattcaaaattttgcaactgatggatcatgggaataagcaaataaaatatgtggttatgagccagaatgtttttcatttttttttcctttgtattattctactcacaggtattctctaaaatttacaagtaagtgaaaaaaagcttagttgaatttaaggaaactgtagagtccattctcataactttttttcactgaattatttttcaggacaccgttgtgaaaggaaatttatattgtgcattatatctatgctttgattattagttatatttatgagtaaactgcaaattttaattttattgaattatattttaattttattttggtccaatgttatgattaattttcttctagaaacgatttctatttaaaaaacacccaaaaggaggggccatccaacaattaccatttttttatgtgcatgaatttcctgggtcaggattttaaacaagaatggcttttctatatttcatgatgtctgagacctcacctgagaagattatcgctgtgatgacttgaatttcttgggggctggcattttccgggagtttctcaagtttagccaaggaagacttgaggcttagggtggcgtaacttgaaggctgagctcagccaggactgtcagcttgagcacttacatgtgacctctccaaatggcttgcaattcctcacaacatggcatctggagtctgggtttgtagcatgaaggtgttttaacatgaatggtttttaatatgaagcatggtaaatgttattaacagacttttctgcatctatggatttgtgtgtgttgaaccaaacttgcatcccagggataaaacctacttgagtgtgtcggattagatttttaatgtggtgctggattgggtttgctagtattttgttgagtatttttgcatctattttcctcaaggatattgtcctgaagttttctttttttgttgttgtgtctctgccaggtttcaatatcagaatgatgttggcctcatagaatgagttaggtaggagtccctactcttcaattccttggaatactttcagcaggaattgtatcaggtcttctttatatatctgatagaattcagctgtgaatctgtcttgtcctaggatgtttctgattggtagtgttttcattactgaatcaactttggaactcattaatggtgtgttcagggtttcagtttcttcctggttaaatcttgcgaggttgtatgtttccaggaaattacaaatttcttgcgggttttctagcttgtgtgcatagaaatgttcataacagtctctgatggtgttttgtgtttctgtgggttaagtggtaatgtcccctttgtaatttctgtttgtgtttatttgcatcttctctcttccttctttattagtcaagctagcggtctctcaattttatttattctttcaaaaaatcaacttataggtttgttgatcttttgtatggtttttcatttcacatctcagtttcattcagttcagctctgatttggggtatttcttatcttctgctagttttagggttggtttattctagtttttctagttcctcaagatgggatgttaagttgttaatttcagattatcctaactttttgatgtggataaactttcctcttagccctgctttagctatgtcccagaaagtctggtatgtagtttctttattctcattagcttcaaagaatttcttgatttctgccttaatttttttgtttacccagaagtcattcaggagcaggttgtttaattttcatatagttgtatggttttaaatgatctttttagtactgatttctaattttattgtgctgtggtctgagagtgtggttggtataattttgtttttcttttctgataattgtcttatggctgtggccaattttagagtatgtgccatatccagatgagaagaatgtatagtttgttgttttaggtagagagttctgtagatgtctgttagattcatttggtcaagttcaagttcagatctggaatatctttgttttctgcctcaacaatctaatactgtcagtgatgtgtaaaagtctctcactattattgtgtagttatctaagtctattaataggtctctaagaactattttatgaatctgggtgttcctgtgttggatgcatatgtatcaagatagttaagttttcttgttgaattaaacccattactattatgtaatgcccttcttcatcttttattttttatcatcatttgtttaaagtctgcttttttctgaaagtagaatagcaacctttgcttttttctctattccatttgcttgatagatttttctccattcctttgctttgagcctatgattgtctcttgagcatgtgaggagggtctcttgcagacagcatatagtttggtttttctttatccagcttaccactgtattccttttaattgggggcatttcgcccatttacatttaaggttaatatttatatgtgtggatttgattctgtcatcatgttgtcagctgtttattatgcaaatgtgatcatgtagttgctttatagtgccaatggtctaagtactcaagtgtgttttgtagtagccagtaacagtcttacatttatatatttagcactcctttaaggaccttttgtaaggcaggcctggtggttacaaattccctcagcatttgcttgtctgaagaggatcttatttctttgattttgaagcttcagttcattggatataaaatttttggttggagtttcttttctttacatatgctaaatataggcccccaatttcttttgggttggagggtttttgttgaaaggtctgctgttacctcaatgggattccctttgtaggtgaccagcctcttctctctagctgcctttaatatttttcatttcatgctgaccttggagaatctgatgagtatgtgtcttgagtatggtcatcttgtacagtatctcacaggggttttctggatttcctgaattagaatgttggccactgtagtgaggttggggaaatttttgtgaatgatatcctcaaatatgttttccaagttgtttgctttcccaccttttctttcagacatacagatgtgtcacagatttggtctctttacataattctatgtttctcagttttgttcattctttttaattcttttttccttatttttgactgactgagttaatttagaaaaccagtcttcaagctctgagattctttccttagctttattcttctgctaatatttgtggctgtgttgtgacattcttgtagtatacagttttcggctgtatcagatcggtttagttctttcttaaagtaaccatttcatgtttcagctcccatattgttttgttgtattccttagattccttggattgggtttaactttctcctgaatctcggtggttttcattcctatccatgttctgaattctatgtctgtcatttcagccatttctaagaaattaatgtggtcatttgtagggaagaagacactctgcatttctgagtagccagagttcttgcactggttatttttcatctgtgggggctattgttcccttaatctttaaaactgctgtcctttggatggggtttttgcttttatcttctttgatgcacttgggggtttgattgtggtataaggtggattcagttaactaactttgattctggaagacatcagtgggccaaagcttagctctgcactcctgggctgcatgctgtaattctagaaggccagtactaggtccccagtttcgttgtctgactcctcaagattaggaacctggtgggctggaggggccaaggtgttcccagtctgctagacccaacgctccaatgggaatgccatccaaagtttttcataggggcagtgccagtgagatccatggttgcttgtgcatgccagcagccatggcagtgcagcagggtgcacacacgtcatctggaaaggggcactggttggagcaggtcatcagtggggatggggtatcaacaggggtgttgtgtatgcactttcactgggggaggtggcggtggtggcttttatgaccatttaaaagtagaatatgtatattgaaaaatgagtttatgttttttagaagttattttcatataaaacttttaattgcagggcagttaaaaaattctgttaatatttcctttagattagcccgtgtttttcctgatttcctttctgatccaattattctaccctgtctactgcccatttatccctgcagtaaatactctaataaacttgaaggctgcttttccttatatagggaaaagggaaaaaaacactcctgtgggtccctgtaatcattccctgtctgacaatacctacctggtctcatgtggatctagagttttccaacatttttcctagaaactccgctataaaacattgctgtcaacttccttttcttttttcttcatcaacttttgtattaaattctgcggtacatgtgcaggatgtgcaggtttgttacataggtacatttgtgctatggtggtttgctgcacagattaacccatcacctaggtattaagcccatcatccattagctattcttcctgatgctcaaactctccctgctcccagacaggccccagtgtgtgtggttcctcccagtgtgttcatttgttctcattgttcagctcccacttataagtaagaacacgcagtatttgattttctgttcctgcattagtttgcttaggataacggcttcgagcttcatccatgtccctgcaaaggacataatcttgttcctttttatggttgcatagttttccatggtataaatgtaccacattttctctgtctagtttatcattgacgggcatttgggttgattccatgtctctgctattgtagatagtgctgcaatgaacatatgtgtgcatgtatctttataatagtatgatttatattcctttgagtatatacccagtaatgggattgctgagtcaaatggtatttcttcttctggatctttgaggaatcaccacactatcttccacattggttgaactaatttacattcccaccaacagtgtaaaagcattcctttttctccacaaccttgccagcaactgtggtttcttgattttttagtaattgctattccgactggtgtgagatggtatctcattgtggttttgatttgcatttctctagtgatcagtaatgttgagcttttttcttatgtttgttggctgcataaatgtcttctgatgagtgtctgttcatttcctttgccccctttttaatggggttgttttttttcttgtacatttgtttaaattccttgtagactctggatattagacctttgtcagatggatagattgcaaaaatgttctcccattctgtagattgtctgttcactctgctgatagtttcttttgctgtgcagaagctctttagagtaattaaaacctatttgtcaatgttttcttttgttacaattacttttggtgtttttgtcatgaaatctttgcctgtgcctatgtccttaatggtattgcctagattttcttctagtgtttttatagttttgggttttacatttaagcctttaatccatcttgaattaatttttagaaggtgtaaggaagaagtccagttttaatttcctgcatatggctagccacttgtcccagtaccatttattaaatagggaatcatttccccattgcttgtatttgtcaggtttggtgaagatcagataattgtaggtgtgtagacctatttctgagtactctattctgttttgcttgcctatgtgtttttgtacaagtaccatgctgttttagttactgtagccttgtagtatagtttgaaatcaggtgtgtgatgccaccaggtttgttctttttgcttaggattgtgttggctatatgggctctttttgcttctgtatgaattttaatatacttttttcctaattctgtgaaggatgtcaatggtaatttaatgggaatagcatagaatatataaattgtttgggcagtatggccattttcatgacattgattcttcctatccatgagaatggaatgttttttccatttgtttgtgtcccctctcatttccttgagtagtgctttgtagttcttcttgaagagatcctttacttcctttgttagctgtattcctaggtatttagaaatgataaggagaatatcaccactgaccccacagaaatacaaataaccaccagagaatactataaaaacctctatgcacataaactagaaaatcaagaagaaatagataaattcctggatgtatacaccctcccaagactgaaacaggaagaaattgaatccttaaatagaccaataacaagttccaaaattgaggcagtaataaatagcctaccaacaaaaataaaagctcaaaaccagatggatttacagctgaattctaccagaagtacaaagaggagctggtaccatttctactgaaaatattccaaacaattgaaaaggagagactcctccctaactcattttatgaggccagcatcatcctgataccaaaacctggcagagatacaagaaaaagagaaaacttcatgccaatatccttgatgaacatggatgcaaaaatcctcaatagaatgctagtaaactgaacgcagtagcacatcaaaaagcttatccaccaccatcaagttggcttcatccctgggatgcatgattggttcaacatatgcagatcaataaatgtaattcatcacataaacagaactaaagacaaaagccacataattatctcagtagacgctgaaaattcagcatccctccatgttaaaaactctcaataaactagatattgaaggaacatacttcaaaataataagacctgcatatgacaaacccacagccaatatcatatggaaggggcaaaagctggaagcattctccttgaaaaccagcacaagacaaagaggtcctgtctcaccattcctattcaacatagtattggaagcattcagcagagaaaaaaaggcaagagaaagaaataaagaatattcaaataggaagagaggaagtaaaattatctttgtttgcagatgacatgattatatatcaagaaaaccccattatctcagcccaaatgcttactatgctgataagcaacttccacagagtctcaggatacaaaatcagtgtgcaaaaattgctagcatttctatacaccaacaataagcaaggagagagtcaaatgatgaatgaatttccattcgccattgccaactcccttttcaaaatggctgatattgtgtagattcctggtttggggtagtttaaccttcttttctgcttgtacctaatgttatcctaaggtttgtatgctctgttcccccatcaaaaatagctgatagctcaggtgatggtgaaccaacccagagccccaggagttcagaaagagagaggagtggaggtctcagtagtaagtcaagttaggaggtccagggaagtggaaagtcagtgccagaaatattcagtggcagagaaagcaaaaacaatatggtctgagggagacaggagcaggatttttgttcttggagcaatgtggtgtttgggctgctactttaagttgggtgccagacacagaattaaaagataagagaatacaacacagcaaacaaagaaacaaacaaaaattattttatttgactggtagtaagtgatggggcaaggagatggagaatgtagtaaaattactgcaaataacttacaatataggtacaaatttgtagctgaataaggcaagaactaaatttttatatcttaagtatatttttaggattgccataacaaagtaaaatgaacttggtgttcagaaaaacaactgggtggcttaaaacatcaaaaatgtattccctcacacttctgaagattataaatctgaaatcatggtgttgacagcgttggttcctttctggaggctttttcccgggaaggtctgtcccatggctttctcctagcttctgttggctactggcaatccttggcattgcttgacttgtagatgcatcactccaatctctgccttcttcacatggcattctcctctctgtgcatgtctgtgtccaaatttcccttttattagagtgccagttattggattaggcccaccctaatctagtatgttctcatcttaattagattaaatttgcaaagactattccaaataaggtcacatatacaggtactggtggttaggactcgaacatatctttattgaggatacaactcaaaccataataccaagatatagatgagtagaaaagacatgcgaatacttttctcagattctttcaagtcttcccatctagaatcatggttgaccttaatatgtagagcccaaaaaccccacccatgaaatctagctctaaaagttagtggggcagggtgcggtggctcatgcctgcaatcccagcaccttgggaggctgaggtgggcagataacttgaggtcaagagttcaaggctaccatggtgaaaccccatctctactaaatatacataaattagctggtcatggtggcacatgcctgtagtcccagctacttgggaggctgaggtgggagaattgcttgaacctgggagacaatgagccaagatcgtgcctttgcactccaccctgggtgacagagcaagactctatccaaccccgcccccgcctccaaaaacaaaacaaaacaaaacaacaaaaataaaagtagtggaaaaagagtagaaaggacccagcaaatggtgagaaagcccacagagaatactagaaacttgggatgagcagaatatacaagtgaagaatgaaaaaccccaaacgaaaatctgtggtaacaacttgtgtctgtggtacattccatggttgtcctcaattattacccttcgttgcatccatacctttgctatagtttcatgagaagagtgtatttcccagcctcttgactttgactatgagacttgcataagtcagtggagtggagatgaggtgatagggtgtcaattccaaatcacacaagacctaaagcatttctgattccctcttacgtctctgctattgccataaaaacaagtttgctggtgcgagaataaagaaacacatagagcagaattgtgtcagcctctcaacaggactggagtgaggagcatagccatcctggtgcagtaggctgtagcagagtcattcatcactgaggattctccagggacacctgggagaaaaaaatgactcttttcttaagacaccaagtttaaggaagctttattatataacattatcatggcaagaactgatatagcagtcatagcatgaaacttcagaagtcttaacttcagttatctagaatgcttacaatttttttaaaggattaaaataaattagacaatctagtacttatacaagaagatacacatgtggcaaatcaagggttaatatttcacacaactgcaagagaatgttaatattaagggataaaactctggagaagaaggagaatcagtagggcatgtccagttggaaaaagtgctgaaaattaaaatgaagaaaaagaaactgaaggttttaaagatagctgttttagtctgcttggtctgctataacaaaatgctgtacactggagggctgcttaagcaatataaatttatttcctacagacctgaaggctagaaagtccaaggtcaaggttctaatagggttcagtttctggagagcgctctcttcccagcttgccaatggcagccttttcactgtgtcctcacatggcagagagagaaggagatctctggtacttctttctctttaataagaatatcagttctatcaggtcaggtttttagccttatggcctcatttcattttaatcatcttcttaaagaccctgtgtccaatacagtcacatggctgattagggctttatcttagactgttttctgttgcttataatagaatatctgaaactaggtaatttatattaaaattcttacagttctggaagctaggaagtccaaggttgagaggctgaatctggtgagggccttcttgatggcggggactctctgcagaatcccaaggcagtgcagggcatcacatagcaaggaggctaagccagctagctcaggcatctcttcctcttcttataatgccaccagtcgtgctctgatgataaccctttaatccattaatcaataaacagattaatccattcatgagggcagagccctcatgactctttcacctcattaaggccccacctctcaattctgccatactgtggattaaatttcaacatcagtgtaggagggtacaataattcaaaccatagaaggcttcaacttacgaattttgagggaacacaattcagtccatagcaataacttacatagcactcgtggttctgaattcttaagtaatagaataaagaagataaataactaatagtaataatagttccttaccttgagatgatattttatatttttcactgttttattttcacaataactaatgttctataccacagtggtgtaaataattactgcccttattgtataaacgaggaagccaaaatattttacaaatgaggaaaatgagtgctttgtttaaagggtaagaatgatgacgactcaagagtgtggaaacctaaaaagcctgagtactcacccccaatatccttttgtaatgatagcttttaaaatcagagaatagaaatctggcacctactattacataagccactcccattctggacattagatttgagacgttcttcattttccaggttaatttcaaaatctgtcattttagagatgagtgtactgaggtgaaagaagttgggttggcttgttctaagtcacatgtgatgaaatctagctccatcttccgaacccatagcacccagctttgacacctttagcagatataaaggtaacagtaactattgctaaactatcaattttcacttgttgattagacatgatgacaaagtgtatactgaagattagtaataaatttgcattctaactgagcctgcaggctgaccagtgctaaagtgaagacacaatgaagtggttgtgggtagatagaagtgggaattacaaaagttatcagactaattaaaatctgctcaaaatcaaaattaaagtctaattccttccaaaattagaaagttattcatttaaatatattagatatatgttttccatttctttctttgtacattggaaaccattttgtatgctctgtgtaccaggcattgtgctacaagttgcacaagagtagaaaaccagacaaaatgcttaaatataaatagcaagttgttgggggtgggggacagattattgaaaaaaactaaaatgtggggacaaaatctgtaagtaactaatttcaagaattgaaaaaaatcttcatacagaatattctcacctgatcatagagaaattaggttcagacatctaaattcacatattttccacccatgtcctcataaccaggaagctattggttaatgttctcctgcaaaagaagaagtaacacaaaggacaagagaaggaagatccaaaaaggagaggaaacatgacacacaagaccagtgaatggaagccccagaatgaagcaaagacacgtcccaggaagacaggcctacagaaaatatctggattggagcaagaaggcagtagctcttggacaaaggttttcatggggaaaaaaggaaggaattattaggttgtctattatgatatgccacttggagtaaataaatcttctaagaggtatcatcattcctccttattcatagggagcacatttcaagaccacagtggatgcctaacccatggatagtactgaactctatatatactgtgcttttcctatacatacatgtctatgataaagtttaatttctaaattaggcacaagaagaaaaaatcgcaataactaataataaaatagaagaattataacaatatgccagcatcactgctcttgtactttggggccattgtaaatagaattagggttacttaaacacaagctctgagtcaatctgctaagtgagatgactgctaagtgactaatgagcaagtggtatatacagcgtggatcctctagacaaggggatcattcaagtcccaggtggaatggagcaggagggcaagcaatttcatcacactactcagcacagtatgcaatttaaaacttatgaattgtttatttctgggattttccagttcatgtttgcagattgcagtagaccacaggtcactgaaaccctggaaagtgaaactgaataactggggactattatatattgtagacctgatgaagtattctgaaaaatcattgggatagatacatagataactatgcctggtaaaaatggcaatttttacttccaggtggaacaaataagttctaaaagaagggacatgcaatcaaaattaattggatcagcagtgggtaacatttacttaggtaaaatataaagagatgttattgattaattgtaaatgttatgtaagtgtactatgagtatgagagaaatgttttaaagtactttattaattatatatttccatataacaaatcatcaaaaaatttgtagcctaaagcaataagtatttatcttcatactttttttttcattcaaaagtttggaagcgatttagctgtatgagtctctcatgaaaccacagacctgaggctggcagagactgtggtcatctgaagacttgactggggccatggcaacaatttctaagctcattcacatggttgttggcaggaaaccttggctactcagtggccactggacagatgcccagttcctcactgtataggcctcttctcacaacatggttgctaacccctccaggtgcaattaatccaagagaatgaacaagagagagaccacgatggaagcaacagtgcctttttatgacctgatctgcaaagtcaaacactgtcatctgtgctttcttccatttgttagaagcaagttacaaatttcagccccatttaagaggaggaggattcagcctgcctcacaatgagtttcagagaatttgtggacatatctttaaatccacatagaaatttttttatcaattataaaaggcatcaaaacaaaaactttaaatttgattaatcaaaataagcattttattttaaagtataaaaaatgatattaaaaacagctgaaagaagtaaaagtgattggagaggaaaattaagaagatagggagaaaagagataggaagctaggttttacattgctttgcagcccttttgtaattattttttcaattaaaagcaaagaaagaaaagatggaaaattaaaaaaaaaactttctcaccatgtgtttcagcgttatttaatgccatatctatttaccattgaaagtttccttctataacacttgtgttacttcttccatgctgtgagaattacagacctaaagaaagaaagtaaaatgttaatgcaattcttcttcccacctgtttttcctgaaagaaacagaagggaatggaaggaaaagaaaagtaaaagaaggggatgaaagaaaaggggaagaagtaaaggaaggcagaagacaggggagaaggaaaggaggtagttacattcttcttcaaagtcactgtatctggcagtacctttagtatttgtgaaataagaaagcattaattaaatttaaagagaattgctatacatcagttatccaggagcttgattcatatttgttgagtgaattaatgaatttccaaaaactttaatccacaaatgctgtcaagttctcgaatgttattgattttcccacaaggatagtagatgaaaaaaatttctatattcctggggaaaatcttatctgaaggctttcttgtttttatttccatttgtgtatgttttcgtctttgtccccatggcaccaaatattgcttcagaaatataattgttgaaaagcaatgtatccaatactgggctgtgctctagggcaggaagccatcattctcgctctaggatggatctggatgggattgtctcttgttccctgtgtccttgtgtccttgttcaatttacagtgacccaggagacctacctggatgcatgttttcttgtttctttctcctgtgtggccgcaccattgtgaatatgttcattgagtttcctacaccatgatgtgccatggtgtttgtatcagtgaggatgtaaattcagcaccactgaatggcaggaacgacctaaagtgggtcaaactagtaagaagttttatttttctcctataaaaagtagtagggaaatagcctgcaattgtctcctttttcctttctgttctgccatcttaggatgtggttttcaggctcactcttgttgcctcaaggtttgaagacgctggcttctcctctggctttgcttctgcattcctgccttaaagaagtggaagattcaaggccaaatatatgaggcagccaagcctttcctcttctaagcagctttctcagaaagtccaagctatgaacacaggtttgttgcctgactacccttcagtgtaaggatggctgaaaaatgtaagattcctttttcattttcagttttttctgtttgcttatttcttttcacccagacacactgctgcttgttctaaactatgcatattggttatggtatggtcaagtcagtgtagccgctggaggaaagaaaaatgaagcttgcaaggaagaagttgtttaggcccacaggtcccagagaggagggtcaccctgggtcgtgtaaggccacaagggacagcaccagtgtggtcgggagacgaagacaggaggcaggggaaatataggtgagaccgttttttggggtttccatgagagaggcaaggcagggtgagataagcagtttaggattgactagtttaaataatgccagtgagcttcaggacattgtggtggtctttcgttggctggtacctggtcctgtgatgatttaggacaggaaaaatagtggcttgatatgtaaaagttagttagataaagaagtggttgtggctaaagtctcacaattggttggtttatgtataaaagatgtgctcacggctgagctccttgctgtctgtaagaactggctagccttgggagaagcaatctctggcttttcagatgtcaaaacatcataaaatacagaaaataaaagacattattgatattaatatactgctatggcaaattgcttgcaaaacatcagcaatgatttctctcctttttcccagtccccttgcaatgtaactttgaaccttctcccactgagaggtggagtctgcctccctactccttaagtctggacttaccttgtgacttgctttggccagtcgaatgaagtggaagtgatgtagtgccaattcctagcctaggcctctaggggtaggtgcttgaatgctttgtatcactctctcagaactgtatcgatcccccatctaggctattccactggatggtgagagaaacagggcccgtcacccctgtcacgcagccaatagctagccaatccccagaactagagttatctagttgaaaagcaagtgattgcagacatataaatgagactagctgagaccaaaagaacacccaactgaaccaagcccatagagctgacatacagaattatgaaaaactattgttttaagctactcaattttgtgacaattataatacatcaaaggctaactgacacaattgccctataaaagtagggttacattattaagggagaaggtaagaaaggaaattggttaggcagctggttgagtctgccatggggtgaccaggatttccaactctgtggtattcttgggacttaatggagctgatgtctttttaatttatttttaaaagttcgataatatggctgggtgccgtggctcactcctgtaatcccagcactttgggaggccaaggcgggtagatcacctgaggtcaggagtttgagaccagcttggccaacatggtgaaaccccatctttgataaaaatataaaaattagctggacgtggtggtgggcacctgtaatcccagctactcgggagactgaggcaggagaattgcttgaacctgggaggtggaggttgcagtgagctgagatcacaccattgcactccagcctggacaaaaatagtggaaaatctgtttcaaaaaaaaaaattcaataatatgataaatatttattatttcttcattcacttaacttttaaaattttcattttactggcataaaaacacttaacatgagatccatcctcctaacaaattttaattatgcaattcattattgttgactctagatatttggagagcatattcttagagcttattcatctcatttaactgaaacttcatgcctgttgataataactcatttctcctccccccaccccctggtaactcccattccagtctttaattttatgaatttgacaattttagatgctttatacaggtggaattatacagtacttgtctttctgtgactgtcttatttcacttagcataatatcctaaagatccatgcactttactatgattttaaaacaaagctgagatagtcagatattcaggatgcatatcaactgggcacatggagggcatctgtgcatactacagccctgtgtctttctcagcttctcattcagtggaacatctgcagccaacatggtggtttgggccatcatcaggtttagatgttttcgtttttacttatatgttatttaactcatgccagataggactgatggctagataggagaatgaagaaatgctaatttggaaaattaacaagttgcgtaaaaatctcattaaattgtctttaccagcctgtgggctacagtcatgttgtctgcttcttggatagcagggagactttccatggcacttcaggagccaacggtaaaaaggaaaaatatagcaatgattattatatccaatatggcatatcatttattgaaataagcactaaccatacttataaaatgtaatttgaaaagaaatactcctaagtacatgtcagaaaccttctcttgcatttcctcattttgaaacatgagaaacgtgtacatataaaccatttaatgttttatgcaaatgttacaattccaaatatcaggtcataaaatttagtatttgtggtatgtacattggatgctatgatatgaaattttatcaagtacaatttaatgtatattcgttaccaaaactatgatatatctctgataatcaacttaaacattatgtctcatatgaaattagaaaatttaaaagtctaactttatagattttgtatagttattaaatactttagtaagtacatatattgtataatatattcatgtatagagactatatataggtatatatgtgtatgtattgatatgtgttgcgatgtttttctctctaatttcagtcttgaggtctctccctcttgcaggtggctatagactctagcccttacaagacttcaggtgatttggtcatggatgtttatagtacacctttcagggggtgcctttttatactggaggatggcctagtgcctaagtgtcccacccatgagcaggtgttcctctcacaggaaacttgttgatactggctgatgttcttgtggctctcctctgacctgtgtccactttatttctagcaagatagccaatgtctagaagagccctgacctggagagatgtgagtttcaggtgtagggttcaggtgaggcacagaggaggcagcacaggggacacatgaactcacagaagcagtgcattacagtgtattcctagaggccaccagagaagaggagagccatggagagcggggggacagtcatggcatcactgtgctcagccagcaggtggagagtccacaggagagatacctgtgggcctgagccttattgggtccaaggcattgcccaagcagctttccctcaggcagttctaatgggtgggtttagagaaagccaacacgagtcccaacagaccacgctgtgacttgttaaatgtcatcataacatatctgcacagtccatgtgggatggaagggccggtggaatgagtctggtgggttgtatgtatctatatgtcccatagggagatggtgtgccaggaggcaggtgtatagggcagctttctggatcaaccacagggaggaggaggcagagagctagaaactgtgtcaaaggtgactaagcccttcttgtatgagatagttagccctatactcaaaatggatgccacggcagtgcaaaattacaagggctcactacagcatgtgtatgtataagctgcgttgatgtacggatgtgtttctccagggctgctgggcatctttccagattttgagttgcttctctcttccgtaagcttgactgactatgcgtcagactttgggctttgacagaggacaagtcatctgcagctttaaccactatgtcagcagaatcggaactggctgccccactctgggtgtctcagtttcttcagtctgggcatcccagctgtttctgtgtgtcccagcaatctgtttcttctttgttcctgaaatggccttttcttagcatgccctttcatgctgtgggctctttgggagttgcaggtaaaattaattttcccggcatgattcttattagaattcatttccaagaagccactgtctgataatcttggaccaattcaatagagaagtgctgaaattttcagaggctaaacgggacaaaaaataatgaaggccatcttcttactttttatccgagggatgacggaagtctggagtttcaatccactttgaagttcccagccagagggataatttaaattaattaatataaaacaataatgctttgtgcagatgcggttgagcctgcatataagaaactccatatacttcataactaactgcttgtattaatcttctgtcttaattcatgatgggcctgctctctgaacatctccatctgtagcagacctggtttctttacttagcagtaggtactagggcagagaggagttcagtggtttccttagcttcccacaaatttgtaaagaataattaatgcagggccaacactagaacctattttcaactcacttgacataactatgttttctgggtgcacagctgagattttccaaataacaataaacataccttcttcacgtccttactgtgagctactgagctgccaggagtgattacaggtaggtctcttcttaaggagactagactttcacacagaaaaacaaccttatggagtttttacattttatttcggaattggattttgtatctctcaaggcactagactattttactcttcattcttattgcaaatctatgttgggagcacagatatttatatatatttggagcacacaaaaatttattgatgggacttacagagtatgaagttgaaatattcataattaaaggaaagagcttctcatatttgtgcattggagtcatctgtaagaattccggaagaacacaggtattatttgttcgaatctggacaggtgtatggcagagaatgttttaggtagtgaaagaagcagccccttaggggccaggtaaagatcaatatgtgagaaaaaatggggtggggagagaaggaacagaagaagggacacatttgataacacaaggtccaagtgaggtgagacgccttcatcccaatggcattgtttggaacattctatgatataacccatgcaaagtcctttccacagtgtctaatacacagtaatcactcaggaaacatttacagaggattttctatggggcaggcactccactcagtgagttttgtgaagctcacataatttttagaacaatccacgagagagatgctattattatcaccaatttacaggtgaggcagctgagaacagacagtaagttacttgcccagggtcatgtaagcactagccaggaatccatcatttagttgctagagtagtctgcttctttgttagccattatcattagttaatgctaattggctgttgttattagctgttattattatttgttaataataatactgcatactactaatactccatattactactctgcactgtcttcgaatgccagcttttattactagtagcagagttttattatgattgtatgctttttaagaacttaggatctggaattcaagctcccagggttcatgtcttttttattctttttttctaactgtgtaagactaaatttaatctttctcaactggtattgtcatctgaaaaatgggatcatattagtattgtgaccattaggacatttgacagatatgtttttaatcctttccttctgggcacttggtaggatggcacttctccatcttctctgaaagtaggagtggccatgtgactcacatttggccagtgaaatgtgcatggaagtgattggtgtaactaccaagcagacgttttaagagcacagtgaacaatatcctctgttctgcatcggcaatcacgatagagggttgtcacctgagtccttgagttaactatattaagcagagtcctcagacgacccatgatggggcatgtagcatgacaacaagtaaatcttagttagtttagcaatgaaattttgaggtgtttgttcttgtagcataatctacttgacataactagatctgcctagatctagatgcagcgtaacccagtcagtcagtcagtcaggactggttaagttgtgctgtagtaacaaacaaccttttaatgacattgtgtagcttatgctttatatacatcagaggttgactgagtgcttttcttcctatcatcctcattcagagacctagactagcagaggagctgccatcctgaaatttcctggttgccatggcaaagagcatgacaaatcatgctttggctgctaaagcttatgcctgcagtatttgcaggcacttttgctcgcatcttgagagaccccacctagctacaagagttcagagaacagcaatcccacctctattttatttatttatttatttttatttcaatagcttttggggtacaagtggtttttggttacatggatgaattgtacagtggtaaactacctctattttagggagccagaaatacttggtgaatagcggtgataaattacacctcttatatcttttctctgtatctgcatcatttaacatgcatataatctatattaatcctttacattttgtatgtttatatgcaaatttcctaggtacagaaagcaatttgtcagcaattgacatcttagttctaggattaaaaaaaatatttaatgaaatcgatccagatagaatagaattttctttgagacctgaataccttctcttaacttgtatggaaattgttcttttggacagaagaagagattgtgatctccatcttgtgccatacttagttatcatggcccttttggaaaatattaaggcttaagggtatttaaagggacatcagcacaacttttttctctccagttttcacttttcttcatcctagtttgaaaaacctttattatgattatgttataatataaatcataattattttgtatatttgttatcatgtatctcttattaccatcctgcaaacacatgactatacaaattattaaattttcaagattaactgattgaggttaagcttgatttcagatttaaaccttatttttgtatgctttaacttagttgataatacatgtcatgtggctaatactcatttgacttaaaaaaagaatgaaaatagaacactgtccctgataccaatgccataatttttcattttgatgataagccacccaatgtctgaatgagttcccatatacaaccattcatctggaacttccaataatgtcactgtgattgcctatacacagaactttaaacaagctgaaggccaaccagcttgcttgcatagaaaattaaattcttctccctagaacacaccagggacaagcagaatgtgaggatcaatgcaaattaatggcatattccttgatacagattaaaacagacagaagaaatgtagtctcttgggtttaaacacagccttagcagcaaccagactttagttctcaattgcaactccagtactttttctctgagatacagatgctattcaagcagccactgctgcccagcagtgagagaggcacatgtttgatggagttttgttgcattggggttaacaaaagggaataagacctgtcaaaccaatatatttgtcaaggtcccataatatttttcagatgtcagtgacaggaaagcctgtgtgtatctcctaaaagtcttgtggccagagttcacaaatgacttcatgtgtctagccactgaatatgtttccctcttgactttgctgctgaaagttcagagttgagtctgggcacagtgtaaacatttttttttgcagaatttagaacattttggagtactgttcagcctttgttttgctttacctaacctcatgcattgtcttttgttaattatttgaagtctttttatgaaaccaggcagggaatagatgaatgcatacattaattcattgatattctgatggctaaataccaatctttaaggttacagtgatgagacaaagacttaccaaagtccaaaatatctcataagctgcaagatatataagcctacagagattgatgaggttgttaaaatggaatccacttggattgaatggtggccaatctcagagctgttttaagcagaaatgcattcatttcttaaggaaatactagaaaatgtgaacaggccctagagaggaaaaggaaaggccaactgctctagataaaacacaaaaacaaacagaaaggttggaatatagaacacgtcttgaacatcagctttgaaagtggaagctggttcttcattgtgaggagaaatggagagcggttatcagtattaatgaactccttatacttcccaggtaggcctcaactgcttgggatctgatgcaatataactaacttagtgaattagctggggtggaagacagaggttgtgtttcagtggtggggtctgtgacaatctgtaaggtacactatggtaagtcaggaactacaagttgtctgcagctcctaagcacgtggagttaagctcctgaggctggtgctctatcttcctagtaatttattggcgatggtgagctcagaagggaacccaaaggcactttggacagtgctctttagaaatttaattgagccagaggctctgattggtagccagtgtctgtgtggtgtaaagaagaggaaaatattttgaatggaccaagtggctgtggctggatcaaagagtgtgtgttgtgtgtgtgcgtacatgcatgtatatgttggtggagctctatactaaggtggagttgtgactatggaaggaggcagggctgtgacagaatctcttgtgatgatacccatgcgtgtttagggtttggtaaatggcagagcagctcttggtccaagcactttttaaagaactttgcatatattaacactttttaaagattcatgctacaggtactattattatgctcattttagagaaaggaaaattgagacataaaacacatgaatgactttcccatggtcactcaacttctaagtctgagagctcagattcaaacccagacagtggatcttcagacttacccactgctccccatagactttcctgttgtgaattcctgctggaatggccctggtgcactatgcaggggctatcaagatacactcaggagtggcagagttggaaagatcttccaacagcagtcctgagctacttcactcctctaccatcacccaacatataggacctattttatttagcttggatcttaaacaggataaattcccttttctaaaataaaaaaaaaacaaaatcatttctggagacttaatgccttcattttccagcggactggcctgtgaggatcacattccttcacttgtagatctcagggaacagaaacctggccttgatcttttcttttaaagttgacccactttctctgcagtgagcatcttgacaacaggtgtggctccttttgttaagctggtatataatagtaggttccctttcatccttttcttaggataaagcatcccttactggtcctcaaaatatacaattcagggaacagctcaagtgatcctctgcagggcaaagtaagtctgcctctctcagttaaaattaaacaaaacgtggcacccacttcatagttggactcattagagtccctaagtactgacaccaccaccaattatctcatgactcttcaaaccttgcttttgtcacaggagatcatgaccagacaaatgcctccttggagggggaacatccctctgtaataacttgctgtaaagaccattaatagtgaaacttctgcctctgatctgcaatatgctccaattacagttgacaagatatcagaagacaatctattgccagataggactattgaatgctgtagctctgctgtttgaaaagggtagaagatagagaatgttaatattacccaataaaatatctgtattctaaagtaaacaattgagggcatatgtgagaaaacaaagaaagaaggaaataagatgccagtgcccctaactgcttcctggatttttttctccttctttccttcactctttttttttttccgcaaatcactctagagctgtccattttgtgtgtttaccttaaattgtttttgtcttagagattcaggatcacaattagcatttataatgaagatttaagagatgtcagttatgtaggaattttaatggcaattaaaatgttatcaggaaaaatttaaattccaactgaagaaaaagaaaaaaagaaaacagtatcattaaaaaatcggcagtgacattttaatgctggaaaaaaaactcttttccagatctcacaggtaatattctgtgcatggttagaccttttaaaataaatgtcatgtagggtgggggcccacctgcttagtgcagaccaggcagcttttcagaggctccaggccacaacactgggctctcagaagaatggtttacatatggctcatgcctggagactgtatcagttagggtttagccaggaagagagagatactatgagtaatactaaatgaggcctttattacgggaattagatcttactcatatgtggcaagaactggaagtgcagttctggagggaggaattagagaatcagaagattagctactaacttctctgattgcagcactggtgtggtgacatcagaacttgcaggaacattctgtagccaagggcatctggccatcaatgtgggaggacagataaaagaaggagaggcatatgggaagctgttgctgctttgaagatctcactttcgtggatccaaagcccagcatctggtgggcatctggtgctggacatgggataccattggccagcagtttctgcagcaaggaagaggagtgggacaaggagcggaggagatatggataagctgggcctgccagacacttctgctgtgttcactgcagctctcagcatcgtgaccttttaggagtaatggctcctgtttcacttcctccttccaaatcccatgcatgttcttcatttggccaactccaactgagatcaaataaataattctggagaacatacttcgtaggataagcctagttgatataacacaatccggtactctaactatacaatagcttatttatgtcaaggattttggctatttatttttaaacacttactgagtactcgccactattctaaacattcccataaaaagtgtgtttttgacctttaaggagatcacagtctagttagcaaagagagagatgtgaataaaacaaacaaacaaaaaccctcaatgaattcaaggttataaatgcagtatttcaaatatgaaaaaaatatatatttagaaataacaaggaagagactctatctaaggcagtcatagaaggctcctgttggccataaaatggcagttaatacaatccagcaattcagctcctaggcttctaacctggagaaattagaacatgtccacatgaagacagatatagcagcattttatttattattattttttattaaaaaacttttaggtttgaggttacctgtgcaggtttgttacataggtaaactcatgtcatgggggtttgttgtacagattatttcatcacctaggtattaagcctaatacccaatagttaccttttctgctcccctccttcctctcaccctccaccctcaagtagactctaaggtctgttgttcccttctttgtgttcatgagttctcatcatttagctctcacttattgagtgagaacacacactatttggttttgttcttgcattagtttgctaaagataatagcctccagctccattcacgttccagcaaaacacatgatctcattcttttttttatggctgcatagtatttcgtggtgtaaatgtaccacattttctttatccaatatgtcactgatgagtatgtaggttgattccatgtcattgctattgtgaatagcgttgcaacgaacattcacatgcatgtgttgttatagtaattaatattcccctggatatatacccccaatgggacactggatcaaatggtagttctgcttttagctttttgagaattgccatactgctttccacaatggtctaactaatttatgcttctaccaacagtttataggtgtttccttttctctgcaccctcgccagcatctgttattttttgactttttaataatatccattttgactggtatagatggtatctcactgtggttttgatttgcatttctctaatgatcagtgatattgagcttttttcccataggcttattagccacatgtatgtcttcttttgagaagttcatgtcttttgcccactttttaatgaagctatttttctcttgtaaatttgtttaagttctctatagatgctggatattagtcctttgtcaaatgcatggttagcaaatattttcatccattctgtaggttgtctgtttactctgttgattgtttcttttgctgtgcagaagctcttatgtttaattatatcccacttgaaaatttttgctcttgttagaattgcttttggtgtctttgtcatgaaatctttgcgggttcctatatccgggatggtattgctttggttgtcttcaagggtttttatagtgttgagttttacatttaagtctttaattcattttgagttgatttttacgtatggtataaggaaggagtccagcttaaatcttctgcatatggccagccagttatcccagcagcatttattaactagggattcttttcgccattgcttgtttttgtcacttttgttaaagatcagatagttgtaggttcgtggcctcatttctgggccttctatgctgttccgtgggtctatgtgtctgtttttgtaccagtgccatgctgttttgtttactgtagccctgtagtatactttgaagtcaagtaatgtgatgccttcagctttgttctttttgcttaggattgccttggctattctggctcttttttggttccataaacattttacaatagttttttctagttctgtgaataatgtcattggtagtttgataagaatagcattgaatctgtaaattgctttgggcagtatggccattttaatgatattggtttttcctatccatgagcataggatgttttttcatttgtttgtgttgtctctgatttctttgagcagtgctttgtaattctcattgtagagatccttcacttctttggttagctgtattcctaggtattttattatttttgtggcaattgtgaatgggattgcctttctgatttggctctcggcttgggtgttgttggtgtataggaatgctagtgatttttgcacattgattttttatcctgaaactttgctgaagttgtttatcagctgaaggagcttttgggctgagattatggggttttctagatacagcattttgtcatctgaaaacagagatagtttgaattcctctcttcctatttggatgtcctttattaccttttcttgcctgattactctggtcaggacttccaatactatgttgaatgggagtggtaagaggggacatccttgtcttgtgtcagtttgcaaggggaatgcttctagcttttgcccatttagtataatattggctgtgggtttgtcatatgtggctcttattattttgaggtatgttccttcaatacctagtttattgagagttttcaacatgaaagggtgttgaattttatcaaaagccttttctgcatctattgagataatcatgtgggttttgtctttagttctgtttatgtgatgaatcacatttattggtttgcatatgttgaatgaactttgcatcccagggatgaagcctacttgattatggtggattcactttttgatgtgcttatagcagcatttcaattaataatcccaaactggaaacagtccaatgtccatccaatggtgattggataaacacaatttagtgcattcataaaatggagtattatgtagtaatgaaaaagaacaaaccgctgaaacatgtaacaatataaatgaatatcaaaacattacactaagtgataaatgccagaaatactaaaagcatatttgtacttgcctgggctgaggataggggcatggattgattgcaagcagaaatgaggcaacttcaaggttgatgaaagtattctacacaactgaatatctttactagaaatcatcaaactgtatagtttcaatgtgtgaattgtatgctgtgtcagttaaacctcaacgaagctgttaaaagcattgctgtagtatcacctgggcatggcagtttttaaccctaaggtgataaatatatcccaagcacatatatgcatgtgaattctacaaaggtctggttttgctcatcagagacccattatgttaggctaatgctagcaggtataactgatacattcaatatctccaagagttaaaataatagaaatgtattccttgttgctattagtctataacaaacacttcccatttggcaggcagccctccatcatgtactttttcagggccccaagcttttcctattttgtgactttgatatttccaaaatactttctaagattgtgctgttcatcagcatcaagccaaggcaagataaagagagcatgaaggaacacatgtggtggtggtagtgcagtttaaaggccaggtctggaagtgataggcttcatttctactcacattccattgactaagactctatgatgtggccatatctaaaggcaaggaatgctgggaacatcatctagcaatgggctcaggatagagagaagacaagtttaatgagatgctggctgggttcaaccatatcagctgtacctatttcccttctcatctctttttacttgcccatttgaggtttgcaactgatatacagagacacactggccagataaggatgctatttccagtgattaactgattttaaagagagagtccttcctgacattactggccatgagcatcagacgatgttgtttttgttgcatcattatgtactgcacttatctttgtctagaatgtgcagtggaactcataaaagaggattgtgctgatatttgaactgttctatagttatacatcagactgtggcagcaattacaaacatcatccctccatgacacttatttttccctgcggacttggaaatttgtggattaggcctgactggtgaaaatgagtgcgtttagcctttgaaggagcctatttccagtgatggggcaggcttcatgatggcagaatttggctcattacctgtaatgacttttgtgacttaacaatctgagcaaagtccccatctgagcaaagtgatggctgctatttagagaacagatcgatgcaaccacatatgacatcaatattctagctaattagagttttacacacagagaccactggtagaagtcataaaaacaatggtgccccctttgttgacagaccctaacctatttcatgctcagctcttctaattccctgcctcataaagaaattatttaagagggtttattaaagctttcagcgtcctcataaaatagtcctagcatggtaggaagagggtattgatggattgtccattattagctgtgtgtgagatctggagaaagggctgatgcttgttgcgtctcatgatggaagaccagaagtgcttaattacactgaagcactattatcccagcagcaattctgttatcactataaacacttgaaatctttaggatgaactgctctgactcaatagtggtaattgactggaaaggagcatttaaaaagttctgcttgtacctttccacttgtcttgggaactcaagtgttcctgcctaaaaccttccaatgccatcccagcacagaaagaatgtcccgcctcagcctcatggggtccagccccactcacctctccagaatcatctccatctaccctgcacttctggcatccctgccatcctggctttttctctttctcaaacaaaccaagggtactttgccctggcagattttctatttactgttctctcaacttggagtctctcttcccctagctcttcacaaggccagctcttttttacctctaagttttcagccgaaacatcacctcctctaggaggccttcctttactattcaatctaacattatccatccctctttcccatcatctgattctattttcttcgtaacattttgtcatcgtaatacttccttaatttatctggtttcttattgtctgtgtttcctgatagaatattagtcccatcagggcagaagtctttttttctgtcttgtcattaattttagcacccagaactgtgatgcttgaatagctgtgtgaaaataagcaaagaccacttaaatgagagcaagtgaaggctacttattcagagcttgttctggcaagagaatcaacatcatttgcatttggcagagactcaaaggtaggtagaggagtgggaaagctctggagttagaaaaaagggagggcttcagatgtgcactgattggaggctgctggcatgaggaagctggaggtgagctaaatagatgtggggtatcctacagaatgggttacggcggggtgtatttggctttctccagttgttttcacattggaagcagaggccaaatttagggaggctgacagttattaatcaagtcctggccattttcagccaattgctacagaggctgtggtttggcttccagcagcagttgcttcaggttgtgggtaagagttctatttttacacacagcctggtcattgtctgtttgtgtattcagtctctcagaagcaactcagcacacattctttatttaaggtcttttctgctttgattttgcatctggcattcatttttctactcattgttcatatttttcttctttccctctttcacagaaaaccttctttctttaggaccttatctttggacagatcatttatctcaaatggcattttattcattgggatcacacaaccattatgcttatactacacattgttccaatgggatgtatacataggcattaacctgtctccaggctcaatattcctagttcttcctgcttattacaaatccaggatttcctttacaacatctacctctgttatttttcagtcatatcccaccacatccactaaattcttactttcccactatgcatggggtctctttctttctttgttgggaacacacacagcattgagtcttttctgtaatgttcagatcacatcactgcatttggtctcttccataatacaacattgtcacttaatttcttgcttctttctcagcagttatcactgagatgccccagattatgggctactccaagcaccaacatagttatttccttgtacctctcttaccacacaaaataaaactgtcctttaagggatagaaatggaagtttgtcatacttgttcactaaatttcttttaattcctgtgattctatgattctctgttagacaaagacacagttagaggccttcttctcactcacctaagacttccttacctacaggtcttcccttttatagctgagttgaaacagaactaagtaaaagaatctctatactcttagaaggcaaaagctttaaagaaaagaaaaagaaaagaaaaaaaaaaactgtgccagaagggcttagcgctccccacagtaccttttacctcccaggtttaaatggcttattgtcctggttggccaattatctaaatgccatttagtcataattaccttgatgaaaactgtatttatgctctcatttttcctcttttgagtgtgaaaacttggaggacaggaaccaagtatgacatggtttatttatagagccaagtcagggctggctcactgtgggcacttaaatgctgttgataaataatgcatacagtagagctctggttggaattggattaaaccttgagttcaaacgtgttctccctctggttatatctgcttcatatcctagcaaaatgcatcagtgaagttcaatatcagtaactagaggagtgagaaaccagccccaaagaactaagatttttgcattttgagctattgagaatctttgtcctagaaacataaattttcagcttgctacaatgtttttgttgcagacacagcagttgccttcttccagctgaattagaaatgcaaaattggcttcatagaataggctgataattgcattctaaacatcatgtgtgcaattttttttagcttgcagttcagatagagtcacatgtgagacagactgcaaaaaagatgtgataatccttgccctcgatgaacttatagtttatcagaagtgatgagaagtagacacataaccataatgaaaaatactgggaaaaagaagttatcaaatatataacaatgtggtcctacagatagatgtaggacatcaacatctacttgggataaactgcaaaggactttatgaaggacatagcacttgttaaaaatgttagagagctgaaagaaaactgtaggtaatattagagatgacctttcagatagaacagggtgaataaggcacagaggaggaaaaagcataattttgaggaaaagaaaaacatttaacatgtggctccttgatcagcagcatcaatatcacctggaagctgctagaaacaactcattcttgggtccagccttgaccttctaaataaaaatctctgggtctggggccataagtctgtgttttagtgaggactccaggtaatttgatgcatactaaactttgggacaccctgctctgagaacaggcagagagctaaatctaagcctgcaggaacagatatgaggttgcattatattttcccctcctgcttcctcttagaactgctccatcaagtttacctttgacctgttcctccaaataattccttcagaagagtttataaatttggctaagtccccttccttctgaaaatgctttttcttgagcccacatttccttctagttcttctatccaaacacgttccccttatcagctaacttaagccactgagtctgggcttctttttcactcctctttgaaaagcccacttgctaatgtcattggacatctcctgatactaagactacggtaccccttacctaccaccccttgcttttgctacatataacactacgaattgccctcttcttcttgaaacgtaacacctctttgacgtttgcagcccatacatccctagtggtcctggatgttttgacttattttttactttcagtttaggatctctctgccttctgtttgtacttggtgtttctcagtctgctgtcctgagttcactactcttctcattgctttctctccaatggttttactcattctcatgggtttaaacattttctatgtgttggtgacacacaaaattgtatctagccttgactgctttcctagactttagagtcatatattcaacttcttgctcaatatgccttcttgatgccaagaagaatatcaaaatcatactgcttaaaactgtactcctctttcccctccaatgggtctctactcctgtaggcccatttgtgattattggaactaattatgtcccaagctaaaagcctcccctagacaaacatcaaggattttaataaaccctgaatatcatctccttaactttttttgaattcaactcccaatttccatctgtgatactcttgcatgaattcaggctgccattatttataatagggaccactttcacagcctacttcctgttctttaatttttcttgcttccttaaattctatatttccaaacaccttcccagcggtctataatattatcattccattctctgcttcacacctactaaaggttacttccttacataagaaagaatctatggcctgcctttacttaccttttactgtctcatctctcaccactccctagcttactatttatgacttagcaatattcatcatgtataaaacacttcttgtttccctgctatgtttgtattatcagttctatcagctatgttctttctgtgagtaactcctactcagccctggagattcagcttgggtgtagcatcttccaggaagacttagactgagtcaagtgcctggctttgtgcttttatatcattctgtgtataggattaacatggtgcttagtccactgtactgctggcatcatttcctctgcttgtcttctctggactgcaagatcctcagtgctttcattttctgcagttaccataatgctctttattgatctttattttaatctttattttatttaaaattgaattttccacttccatttattcttaaattttattttagccagactttcttgaatctattttgatacccctcgttgagaattgtacttattttcccagtttcagtttattgattacttgccttctttcatggaaagaaatgaagatatattctccaaattttgttgtgaattctagaatcatttttcatatatgtatatatttttatgaaacttttttccctttaatcctatatgttaaaggaaaaacagctgatattgcatgatgagttcaaatgttttccaattaaaatgggggttgactggctttatggcctaccttttccttctggcatcaaaccaagccagagatagattcaaacacttttctacctctcccaatttactttcctccactctcacacccaaaatggttcatcttgaaggtcctcgggcagggttctttccatttctaccctgtcttccaaggcttacccttatataactaaacatttcaggacacaacctgtctctaagcctcccactctaccttctgccacagtgcatgctggaagccacagtttcctgaggacgaagtaaaaaagatgcaggtggggcccaaggtggagggagaaccctcaggatagctcagggcatgacttcttagcttttgggacatggcttcccatctttcagaatcacgcagccccttcatctaggatgtaatacaaagagtgagaatgaatcagtcttcttctgtcttctctcggcctattttgaacttgctctgagtatagagcaagtattgtgtagtttaaaattaaagtccctaacccaacccattttggttgtagttagtagaaattcccttcccacatggcatctggtcttctcttaactttcgtttgcattgttatttccagtgttgtttttttctttaatttgtttatatttgtgggtattttaataaaagatagaaaaatacatggcaggctcagttactttgctactatttaatctagaaatcatgtgtatatattctaaggaaaagcttcatagagaacaatttttaattaaatacaaataagagcatttgggcaggctcctttttgattgaatttcactatcaggaaacactgagagaaccaagtcacagggcttcaccctcctgccaaagagctgtacttcaaatcttctcctataagcaaactattcttctgctcatagtttatttatgtctgtgaatatctggagattttagtagcagtcgtggtggacagaaattttttgtaccctggaaatgtagtgtggtgcttaggcatatcagctctggagtcagagagcctggggtcaaatcccagctccatcttgcactgaatgtgtttctgttctagtttttgaaccactctgtgtatagtttccccaactgtgaaaatggaagcaatacacaaagtatcttcaactccttaatacgatgatgatttaatacaagtattgtaagtaatcaatacagtaaaatcctgagaggagtatctgacatgttatagattttcaacataatgttctttgttgttattaagagaaacatggttttcttacatattttaaaacatatacaacttaaaaactttaaaactaattaaatactttttatctagaatgctttctctagtcatctttctaacttctttgtataattccattaaaattgtttcaaaaggagcttactcgttttctgtccttacaatttgatatttgtcagtgttgcattttcctcaatctcaagtgacagggaggagctgttcagctttgccttgctcctttctctgccatgccgtgggagtaatgttactgactataaagttttcataaaattgctcactgtcactcctgggacacccacagtaatgattaacccagcatgaatggtgcattgtcacaaactctgatgagatgtgtgcaaaactttaaaaataactcgcttcctcttctcaagccaatgctcccattaggcaaagaagagcccaggaactgctgaaaagtgggtgggacaggaatatttggagcctgctctgctattttaaagtttaatatcttgttgttaggtttgtattttcaaagcatggccatccaaccatgtggcactgaaaaacacagctgccggagtcagatgggtggcaggggtggtgactcattatatatctctgggatcactggccaattaaaatgatttgccctagaacctggggaaagagcaaaccccagagtcctgctctcatatactaaacatgaaattaaatagatttggtagtatggttaccaaatgacctgggatgattgggactattctggttttagcactaaaagtcccacttcctgggacccccttagttcagagtaaacagaacagatagtcattctgccaggaattaagctacagctttgccatttagaagcaggtatatgaacttggatagaccatgtggcctaattcccaaggcctaagtcctcttttataatgtggaaataataatatctgcttagcaatattatgagaatcaaatgcaatattgtccattaaggagttctgtgtccagtgacatactatgccaatgtcagcagatgcaatcattgaagatgttgttcctctgagccacaaaggactacccggagaaatacaggatggaggtggttagacaggcttaaagcctgtgtctagaagacttctccaaagcaatggtgagcatgactccacaagcaattgtctcaaagttggcagaagaattcaaaagaagtttagaggtgggggagaaagaaagtggggtgtcacaaagatccattgcatgagatgactccaaattttactcaattcttgcagtgtgctgagggcataggtgcccacccaaaactttgtatgtggcctggagtagcctggattttctcttggaacctgctattcttatatgtagaatatatgtacaatgaagaaccattttacatagactcagttgtctctctacccttccagctgtaaagctataccataccaatgcctttcaggcattagcaattgagggagatgcaggttgtctcctgaactcaatctttcttaggtctcaggccattgtcttttttacttggttacatatttctttgatttttcaccttgctctcttcttacctcctttgtatatgttttgctcttatttccctgtttgctctagaatattacattccatgaaggatgtgcaattcacctatcttgttgactgtcatctctcacaaccagcctgggaggtgaccagccaatacctgttaaatgaaagagtggactggacgttagatctgttatatctgttatattctacagatcacaagtcacaccagctttatgttctttaaataaataatgatcgaatacattaaatgacccaagtatgagtaatgaagttagagataacataaactttctgcctgtgatattttattttctttcaaaatcaatctttggttaaagttaataatgaagagggcaaagatctgaaccatacagtttttagacacctttaatgcaaggatgttgcagacttttagatatgagaatggtggattatagcttaaagagcagatagcttattgaaaatttaaggtaatcagcaatacttttcgaacaattacctcaactgttagctaccacttaccctgaaactcttctttctcttcatctcacagattgtcagtatcatctaaagtaaaagatggtaatgcattcacagtgtgaatgtggtgaattctacttctttgatggtggtaaattgcctgagatgatctcctcttccttccacctctctctcccaaatcagccatgggatgttgactggcattaaaataagaacaacaacagggcaggcaacaaaggggataaggaagagaagggagggtatgtataactcagactaggtctgctcccactatatgatttgcagcagatgttatctgttcaactcaaacagctgatccttgatttaaagataatttgtttattattatactaaatggagcccataaatctctattataggctgatgagaacggaagaaaatagtgtatgatgaaagcaccaaacagaacacatttttcctagcttcattctctcctataatctcaaacactgataagcaatattgacattttcaaagaggcttataagcagtaagcaattcgagttttatatagtaaatgtgtcttgagttacattttcaagtggaagttgggcttagctttggtaatctaccaagcagtatgttttggtgctggctgagtcttgtcctgaaagtctgtgctctttcaagcttcttgtgtacgttccactcccctgggttcacgttctcagggagaaaattggatgcacaaagaatggagtttgcataaggcccttgtaagcctgattatgggtatttacacagctgtaatcattataaataaattacttcataaatttcaacaaatgaaatcatgtcatgttattttgtctgctttttctcttctttgtgccgccaagtcaccagtgtatcatttatttcggctcatttttgtgaaaatgagatttaaggcatagtccagttacagcatctgagagccactgctctcccacctcagtgtttatcttttctgttggagagaaaaaatgacagaaaataaaatatctaatgcactgatacaggaacacatatgtagtgttatgtttctggaggatttttcttttcttttgttaggtatgttaaggtattgtttatatgtaataaaattcacattttatagggacagttcttggagttttgacaaaagtgtagccatatggccacaactaggattaccatatagaatatttctatcacctcaaagagtcctacacctccatcttctactattgttatgttttctgtccctgtagtttttccatttccagactgtcatataaaggaaatcatgcagtgtgcagccttttggtctagctcttcttttacttagcttaatgtttttcagattcatccctgtttatgtgtatatcagtagttcatttctttttattgttgagtggtatttcattgcatcaatgtatcacagtgttgtatccattcctaagtgagagacattgggttattttcagtttggtgttatgaataaagcttcctatatacatagttgtgcgggtcttttgtggatatgtcttcattatttttgggtgaatacccaggagtaggattgctgcctcatatagcaaatatacgtttaactttataacaaatggcaaactgtttccaaagtgtcggtaccattttacattcccaccagtaatggatgagggatccagttgcctccaccttctccttagtagtaggtgttgttgagtttcattaaaaaaaaaattctgattgtttggtgacatctcattgtgttttttatttgcattttccttatgcctgatgatgttgagccattttatgtgcctattaaacatttttgtaccttctttggagaaatgtcaatttaaattctttgccatgattcttcaaaaaatgaagcatagaattgccatatgatgaagcaattttactcctttgtatatactcagaaaaaattaatgcaagatctcaaacaaatactagtacatcaatgttcatagcaacaatattcacaatccaccaagaggtaaattgataaacaaaatgtggtatttacacacaatggaatattattgagtcttaaaaaggaacaaaattgtgatatataccacaacatggatgaaacttgaaaacattaggataaatgaaataaaccagacacagaaggacagatatataattccacttacattgggtacctaaaaggggcaaattcagcagggtgtggtggctcagcactttgggaggctcaggtgcgtggatcacctgaggtcaggagtatatcaggtacctaaaagaggcaaatttggcagggcacagtggcttacacctgtaatcccagcactttgggaggctaaggcaggtggatcacctgagctcaggagttcgagaccagcctggtcgacatggtgaaaccccatctctactaaaaatacaaaaattagctgggcgtggtggcgggtgcctgtaatcccagctactcaggaggctgaggtgagagaatctcttgaacccgggagtcggaggttgcagtgagcggagatcacggcattgcaccccagcctgggcaacaagagtgaaactctgtctcaaaaaaaaaaaaaagaaaagaaaagaagaagaggcaaattaatagagatagaaagtacagtaaaagttaccagaggctagggagagaggggaccacaaattaattgtataacaggcacagaatttctgtttgggatgacgaaaacattctgaaaatggatagtggggagaattatttaacagtgtgaatgaacttttggccacttaattgtacacttaaaaatagttaaaataataacttttatgtatattttaccaccataaaataaaccttctcttcactttatatttttgtctttttgagttttagaagttttttttttatattccagagactagagccttatcaaatatatgatttgcaaatatttgctctcattctgtgagtgtcctttgatgcaaaaaggtttttactttataatgaagtctaatgtatttatttttttctttggttgcttgtgcattggatatcatatctgtaaaaccattgcctaattcaaggtcgttatgacgtacgtttgttttcttctaagagttttatagttttagttcttgcttttaggtttttgatccattttgagttgatttttccatgttgagataggaatccaaatttgtgttttgtgtgtggctagccagccgtcctagcaccatttgttgaaagggctaagctttccctgttgaattttcatggcacaatttgataggaaaagaattgatattttcaatcaattggcaataaatgcatactgttatttctggactctcaattttattccatttatctatatgttttcccttatgctagcttcacacagtccttgttactgtaaatttgtaatctgttttgaaactagaaaaagtaaatccctccattttatgttttctggattggtttggctagtctgagtgccttccatttatacatgacttttagtatcagcttgccagtttctgtaaaatgatgactggaatttagatatagattgattaaatctgcagatcaatatggggattattgcaatcttaacgatattaggtcttccaatttgtgaatatggaatattgtttcatttatttaggccttcttttatttctttcagtgatattttatagtttctggtgtacaaatcatgtacttaatgggttaaatttatcataagtattttactctttgtgatagtattttaaatggattaattctctaaatctcattttggaatggtctttgttcatgtatagaaatacaactgatttggtacattgatcttgatcttgtatcttgcaaacttgctaaattttataagctctaatagtgtatttgtgccagatttatggtttttgatacgtaagatatgtaagatatgtttcattccattcacttgtttctttccatttcccttgtttcttgtttctttctttccttttatttcttttactagcctatttcccaggatactacctccagtacaatgttgaatagaagtggtgaaaaaaggagaaagattcttaggaggtaaactttcagtatttcactgttaagtatgtattttttatagatgtatgcgtttttcatagatgtcctctatcaggttgaggaagttctcctctgttcctagtatattgagtgtttttatcagaaacttgtattttgtcaaatgcttcttttgtgtttgttttggatttttgtatccttgattctattactatgattaattataatgtttgttttgtgagccaatcttgcattcctgacataaatcccaatgggtcatggtgtatatatatttaaatatgcttctgggtttagtttgcaatattttgttgaggatttttttttctaatttttaaagagggaacattagttagaaatttagggggaaatttaggttgttgattggagatcattatttttaatgtaggttcttaaaagtataaatttttctttgaacactgtttgcagtgcatctcataagttgtggtatattgtgttttcattttcatctgtctcaaagtatttcccaatttcccataaaattttgttgacatattgtttatttagaaatgcattttgtaatttacacataattttgaatttccgaaatttccttctgttcttggtttctaatttccttctactgtgaaatgctttgtaagatttcagtcattttaaatttattgagaccatttatagcctaccatctgttaaagaatgtttcatcagcatttctgatagagaagaatatttattccactgctgttgggttgagtactgcttaggtgtctgttaggtctagttggtttatagtttatgtttcaatcttctgttgtcttgctgatcttttgtctagtttttctatccatcattgaaagtgagattgaaatatccaaaatttattgctgaattttctattattccttaaattctttcaacttttacttaatgtgttttgagactctgttgctatttgcatacgtgtttataattagtatatcttcttcaactattgaccttttataattatacaatttctttgtctctagtaacaattttttgttctaaaatctattttgtcctatgttaatagaaccaatctagctcccttttggaatctgtttgcgtaatatatctttcccaatacttttaccttcaacccacttatgcctttgaatttcaaggttgtctctcatagacagcatactagtttattgttttatttttaagtcaattccaccaaactctatcttttaattggagatcatagtgggttgatccgttgtcccctcacaagtgatcaaaccactatgactatatatgtgtgtgtatatatatatatatatatatatatatatatatatatatatatatatatgtctaccttatacctgtgggtgtgaacttgtttggaaaaggggtctttgaaaatgtaatcaagttaacatcttaagatgagatgaattctgggtatgggggagggaggcttaaatccactgactggtgtcctattttgtgtcatgtttattctttattctattttcatggttaattacaatgattgttgtaattaatcatattacatgtaagtaaagagaaagagaaaaatttgacacacagaagggaaaacgatgtgaaggcagaggttgaagttaggcaattctctgcgtattccttggtaaggaataacaaggattgctggcaactactagacattaggagagaagctgtggaatagcttctccttcggagcctccaggaggaaccaactctgctgacaccctgatctcagattactggcctccagaactgtgagaaaatgaattcttgatgttttaaatgacccagtttgtggtattttgttacagcagccttaggaaactgatagagacagaatccttttatacataacgtaattactgatagggtaacatttgcaactgacattttgctatttgtttgtatatgtcttatgtctagttttccttccttcattaattattggcttctttttgtgttaaatggacattttctagtgtgccattttaattactttgctatttccttaactgtataactttgtggattttatttttaataattgccctgagattactattaaccacttaatttatgacaatttacctggattaattttataagcgaatttaatttagagcattaaaaaacttttctcctgtttagctgttttcctctgctttatgttgttattgttacaaattctatgtttatacaatataaagaagatttataatttcatataacttcatcaatctataattactgctttattttacaatcatatcagagaaaaatgggagttacacacaggagatgcatttatactgtcatttatatttacctacatatttacctttaccagtgttttttatttctttgtgtagattttaatttctgtctagtgtcctttcatttcagcctgaagaactcccttaagtatttattatagggtgggactgtcaataacaagctcactctgttttcatgtgagaatatcttaattttccctgcctttttgatggattttttaatacataaagttattttattattattattattattaatgcatttgtttgttatgtaattgtccacttgttctaaaataatttcaacttttattttagatacagtgggtacatgtgcaggtttgttacatggggatattaaatgatgctaaggtttggattgtggattctgtcatcctgctattgagcatagtacctgatatgtagctttaatctacccccctctaccctctagtatttacaatgtctattgttctggtagttatgtccatgagcgctcaatgcttagctcccacttataagtgagacatgtagtatttggttttgtgtttctgcattaatttggttaggattatgacttctggctccatttatattgctgcaaaggatctgattttattcgtttttatggttgcatagtattgcatggtgtatatgttcacatatacaaactacacatttcctttatacaatctaccattgatgggcaactgggttgattccatgtctttgctattgtgaatagtgcactgatgaacatacaagtgcatgtttctttttggtagaatgatttattttcttttaggtatatacccagaaatggtattactgggtcaaatggtagctctgttttaagttcattgggaaatctccagactgctttccacagtgactggattaatttacatttccaccaacagtgtataagcattactttttctctgcagtctcgccagcatctgttgttcttttaactttttaataatagtcattctgactgatttgcatttctctgacgatcgatttatgagcattttttcatatgtttgttggtcacttgtatgttttcttttgagaattgtctgttcatgtcctttgcttattttttaatggagctatttgctttttgcttgttgatttatgttccctatagattctggatattaggcctttgttggatgtataggttgcaaatatctaccctattctgtaggttgtatgttcactctgttgatagtttcttttgctttgcagaaattctttagaataattaggtttcacttgtctatttttgtttttgttgcaattacttttgcggctttagccaaaaattgtttgccatggccagtactaagaaaataatatttcctaggttgtctaccaggatttttagagttcaaggtcttacatttaaatctttaacctattttgagttaatttttgtatatagtgaaaatatggcatatgttttttgtaatttttgtaggtgtactgctttaatcttctgaatatggctggcccattatcctagcaccatttgttgaataggaagtccattccccattgcttgtttttgtcagccttgttgagggacagatggttctaggcgtgtggctttatttctgggttttctattttgttttattggtccacgtgtctttttttttttccaatactgaactgttttgattactgtgtctttatagtatagtttgaagttgcatagtaagatgtctctggatttgtccttttggcttaagatttctttggctattcaggctcttttttggttccatataaattgtagaatatgctatttttctaattctaattttcctaattctgtgaagaatgacattggtagcttgataagaatggcattgaatctgtaaattgttttgggcagtatggccattttttgcaatattaattcttctaatccatgagcatggaatattttatttatttatttgtgtcatctctaatttatttcagcagcattttgtaattctccttgtagattttgtaattctccttatagaatctttcatctccttcgttagctgtattcttgcatactttattttctttgtggttattgcaggtggccttgtcttcttgatttcactctcagcctggatgatggtgcatagaaatgctacggatttttgtacgtttatattgtatcctgaaactttattaaagttgcttatcaattctaggagtcttttggcagaatatttaggattttacaggtagagagtcatatcagcaacaaagatagtttgacttttttcctatttggatagtttttttccctcttgcctgattgctctggctaggacttccagtactatgttgaataggagtggttagagtgggcatctttgtctcagttataaatggggaatggtttgagcttttgcctattcagtgtgatgttggctgtggatttatcatagatggcttttattattttgagatatgttctttcaacgcctagtctgttgagggattttatcatgaagaaacattggattttatcaaaagctttttctatgtctactgacgtgattatatggttttagcttttgattctatttagtgctaaactctttcatcaagaagctagaaaggtctccaattaacaatctaattttacacctaaaggaactagaagaaaaacaacaagccaaaccaaagctagcagaagaaaagaactaactaaaattagagaacaacttaatgaaattgagatgcaaaaatctatacagaaaaatcaatgaaaccaagaataggctctttgaaaaaataagattgatagaacccctagctagattaacaaagaaaatacaagagaagatccaaataagcacaatctgaaagaacaaaggtgatattaaaactgatcccacagaaatataaacaattctcaagaactactatgagcaactctgtggacacaaaataaaaaatttagaggaaatagatacattcctggaagtatacaatcctaagattgaatcaggaagagactgaaaccctgaatagaccaatataaacttctgaaatggaatcagcaataaagaatctgccatcccaaaacagccctggaccagaaggattcacagccaaattctaccagacataaaatgaagaactgacactgactctactgaaattattctgaaaaatcaaggaatatggggtcttccctgactcattctgtaaatccagcatcagtctgataacaaaatatggcagagacacagcaaaaaaagaaaactctagaccaatatccctcattaacataaacacaaaaatcctttaagaaaaaagctaccaaattgaatccagcagtacatcaaaaagctaatacatctcaatcaatcagacttcattgctgggatacaaggctggttaaacatatgcaaattaataaatgtgattcaccatatatggaattattgattaacaatttttttcactttttgaagatatcatctgagtgacttctggcctccagggtttctaatgagaaatcacctgttaatttttttttctttttttttttttttgagacggagtctcactctgttgcctaggctggagtgcagtggcatgatctcggctcactgactcactgcaacctcctcctcctggggttcaagtgatcctcctgcctcagcctcccaagtagccgagattacaggcgtgtgccaccacaccctgctgatttttgcactttttagcagagacaggatttcatcatgttggtcaggctggtcttgagcttctgacctcaagtgatccacctgcctcagcctcccaaagtgctgggattacaggcttgagccaggtgcctggcctcagctgttgattttattgaggatcctttgtacatgaagaattgtttccctgtttctttttagcttctttcaagattcttgttgtctttggcttttgggatagttgcttatgatgtgtataggtgtggatttctgagtttattctatttgtagttcattgagttttgtgtatgttttggttaatgtctttcattaaaattaggaagtgtatggccattattccctttagcctgttgatgtaatggattacatttactgatgtttgaatgttgaatagtcttgcatacctgggataaatcccactgggtcaggatgtatagatcttttcatacatcgttggattgaatttactaatattttgttgatgatttttgcatttatgttcagcagagacatttatctgcagttttattttttattttttgtgatatatttatccaattttggtatttgggtaataatggcctcatagaatgagttaggaagtatttcctcttcttttatattcttgaggagattataaagaatttaaatgatttctttattaaatgttgggtagaatttgctgatgaacccaagtggtcctgatgcattctattttggaaggttattcattatcaattcaatttttaaaatagatacagacctattcaaattgtctgttttttcttgagtgacttctggcagattgtttctttcaagaaattgatccatgtcatctatgttactctatttgtggaaatagagttgttcgtaacatttctttattatctttataatgtccatgggacctgtagtgatggcccttctttcatttatgatattagtaatttgtatatattttttcttagccatctagagtgttattaattttattgatttttttcaaagaactagcttttgattttgttgatgtttcttcattgacttcctgttttcaatttcaccaatgtctgctctcttataatttcttttcttccgcttactttgaaattaaatttattcttctttttctaatttcttaaaatggaagtttagactattcactttcgatcattattcttttctaatataggcattcaatgttataaatttccctttgatcactgcttacactgcattccttaaattttgataagttgtttccagactggaaactggagccccttatttcttcttttttttttttttttgcccccgcctttttttctgtctctgggactcccaatatggttatgtcaatatgctcaacagttttcacaagtctgtgaagctctattcatttttcttcatttttttccctttagtaatggactgaataatttctattaacctatgtttaattatatttgttttttcttttgcctgctcaactcttctattgagcttttctagtaaatttttttggccacctttttttttttttaaatttaagttctagggtacatgtgcacaatgtgcaggtttgttacatatgtatacatgtgtcatgttggtgtgctgcacccattaactcatcatttacattaggtatatctcctaatgctatacctcccccctccccccaccccatgacaggcctcagtgtgtgacgttccccttcatgtgtccaagtgttctcattgttcaattcccacctatgagtgagaacaggtggtgtttggttttttgtccttgagatagtttgctgagaatgatggtttccagcttcatccacgtccctacaaaggacatgaactcatcattttttatggctgtgtagtattccatggtgtatatgtgtcacattttcttaatccagtctattattgatggacatttgggttggttccaagtatttgctattgtgaatagtgccgcaataaacatacgtgtgcatgtgtctttatagcagcatgatttttaatcctttgggtatatacccagtaatgggatgtctgggtcaaatggtatttctcattctagatccttgaggaattgccacactgtcttccacaatggttgaactagtttacagtcccaccaacagtgtaaaagtgttcctatttctccacatcctctccagcacctgctgtttcctgactttttaatgattgccattctaactggtgtgagatggtatcgcactgtggttttgatttgcatttctctgatggccagtgatgatgagcattttttcatgtgtcttttggctgcattctctagtaaattttttattttggttaatacagtttttgactccggaatttctatttggctccttttataatatttatctctttataaaattctctatttggtgagttatcattttcacacttttctttagctctttagacatactttcctgtagcattttgaacatatttagaatagctggtttaaaaaatctgtctaggccgggcacggtggttcatgcctgtaatcctagcactttgggaggccgaggcgggtggatcatgaggtcaggagatcgaaaccatcctggctaacacagtgaaaccctgtctctactaaaaatacaaaaatacaaaaaactagctgggcgtggtggcgggcgcctgtagtcccagctactcaggaggctgagacaggagaatgacggtgaacccaggaggcggagcttccagtgagccgagattgcaccactgcactccagcctgggcgacagagtgagactccgtctaaaaaaaaaaaaaaaaatctgtctaataagtccaacttctaggcttccctagggagtttccattgattgctcattttttctaagtgagggctataatttcttctttctttgcttaccctatttgttgttgttcttgttggacaaggacactgtaaatagcatgcagtaacttgggaagtcagattctaccccctcaccagggttttttcttgttgctgcttgttgtagttatttgtttcatgatttttctgaacaaattctgtaaagtctgtattctttcagtgtgtccactgaagtgtcactcggttagctttgtggatagctcatatttgaacagagatttcctcaaatgtctggaaccaataaatctactctttgcctacgggctctgtgtgtgtgtgtgtgtgtgtgtgtgtgtgtgtgtgtgtgtgtgttggaacatggcttcaactctcacccaggtaactgacaactctgccttaactttcactttctgcttgtgcaaagcctcaaggtcagccaggagtaaaagctaagggccatctcaagtctttcctgagtatgcatataaccgtatgcatgtatgtggccttctagcttcccaggaatatgttagaggttttgaaagtctctttggatatcttatttttcagctgttctttttatgctttttggatagaatattgtttgcccaaattgttatctatcctttcaggcagccatgacattcaaacccttgctttttattgtttttgacaaatgttaccaaggagaggctttctgcactgggtgagctccaatttaggtcaaatacaaccaagtcttccagggacccaccgatgaggtaaaaaaaaaaaaatgacaatttggggggaattaagctttgaaaaatctccagttctattctgttccctccagactggaaatgcggtcttttattttcaaggctactgttaagttggaaagtgagggataggactagggcaaattaaaatgccacaaagctttgtattcttcctgagatttcactatattccctgaacaaacattctccatgttcctgaaatccattaaaatccatctaaaaaagttgattctgatcatttttgtgagtttttcattgcctttaaaagggaatgctttttcgtaggattttactttaccatgtttgcttacatctaaaatgtgtgtgtgtgcatgttcttatatgctagtgcccaaatagatgtaatgagcgctatatcccttttaaaagtgatatagaggttaagatttgcttttaatttgagtaaaatatgtagtaggtgatgtataagaagacccactttactaactggtcagatgtaggattggaaaatctgtaaggacaataatttcatgttattttaagggttcctggacaaatcctattgtaggacttgggccacctcaaagaattaatgttttctaataattacttttttctttggtcactagactctcctctaaattaattaaaacatgaaggccttaaaaaaaacacctgacaatttcaactgtattatgatgcaacggttttaatttaggcacaaatgaaaagttgaaaactaagagtgtgatttttatttcattgttttattttagaaggtcaaaggattgtttctgccttggaagaacagtatttgaatgcttaacctctctcaataagtctcagaatacactgggttgggccagtaaagaaagatggtccaacaatcatttatttaagcaggacaaggacctgatcttactgtcactacaactgctgagaccctttggctgaaattcttttgtacatctaaataccgaagaagaactcagtattattcagggctcattctctgcatcttcttacctccttctctgtgccttcttttctctttctccattccatacttggttcattgtagtgagaaactgtagcttttcatttcagtctttggttaggggcccttcttttttccatactgaatccagaggacatgggatgtggcatggaatcttgtttttaatcatagctgtaagtatacatttttttttgtgcaccatcaatttggagagggaaaaagactccactcttggcttcatctatgtaactagaagtttattcctaaatcaaacagtcttagcaaggatgacttatttcataatattcagcaaacattatgtaaaatcatgcagcatattggaggcctcactctagaaagaagtggagctaagcataaagtatgtgtgctaatagctttgtgactgacttggcccacatttatgaaacgatggttcttcatatctggtctatcaattgactgggtttacactctgattaaccgagacgtcgataaattatattcatcttgactccagatggcaaatgtgcttatgaatttgggtacttgactacattgctcttctagtaaagttgcatacagttggtaaagggataatgctgggttgcatatgtgagagaaatacaaaatatctggaatatgaagaatttatttggagtgtaggttctttgcatgtcattgctcatggcccagtcagaagacactatggccatgatatatttggtctggcaattgttctcacctaaaataactacatcagaccaatgtatagtttatatgcattattgtttcattcttggttgcttacattgcaaaaagttctgaagtaggccagatcatatctgtatagaagacctaatttgattgggcagagcacatctcattaattcacttgtttatttaacaaatatttattaaaagcttactatgggccaacaactctgcctgatgctgaaagataacaccaaggataatgcatagtgactaaacaaagctttgcctggtgtttggatcagaagctgacagaggaaccatcgatacaaatttggaacaagcagctgctggagacaaatgagccttactactttctttttcaccagaactgctacatagagcagctctgtctaatatgggagccactagccacagggagctctttaaatttaaattttaaaattaattagcgttaagtaaaatgtaaatatttgcagtcatgctagcctcatttcaggtgctcaatcagcacatatgtctagtgactactgtgttgtgtagcacacgtataggatatctctactatcacagaaagttctattctatttagcagccctgacacagaagttggaaggaaaaaaaaaagcctggtaacttcatttacaactttatgattaatatcaggcagaatttatgagttaacactatttcctacaatagatacatttatgaggacaagaaattctctaaaatgtgttttaccagctttgaagttaacacaaaaagacagactgtagttaatttaaaaagttgttacctcgagtgtcctcattttccttatagtgaatattagaaaagatagaaagctaatgtaaaaactaataatggttgcactcatttctaactcttcacgaaattcattctcctctttcttctttcaatacattgcaataatacaatgtacttagctgaccaactaccctcccttacggctgggtatggtgacttggttctcaccaatgtgaattgaagtaacatcagttctggacagaacctttaactggctgacgtgctgccttcatatctttttttcagaaaaactttgctgcaagtcagcttttgtctcatgacttccatcatgcagcaaagaagaccaccctgtgtataccatggtggaaaaacatgagaagtttgagtctccaagactgtgtggggtcaagaggccctctaacctgaaactgcaactgatatatacaagagaaacacatttgcaccttgtttggtccattgcatttgatggtttgtttgtaaatgcagctaatattacccttatttacataagagcagatagaaacttaattttgcttgagaataacttttcaatcttaaatgttagagacaaggttttttgttttgctccctcaattataaatattctgcatcttttgtaatttattcaaaaaataaatttattatttcaaaaaaaattttttagcacttcttgaataaacagtacttttattcttaatgagattgctttctatatctgtaaagcccttatctttggttttataagaagcaatgtctgagttgtggattctcttgcatttcttgagtgggtactctcaagaacctgtgaagtggtgagggaagctggatatggaagagaaaagagccaagaaaagatgtgattcggctgaaaacaaacctcagtctgattgcacaggatgctctaggtagaaatctcactgcagagtggttcgtccctgaggcagcagcagttttttgagccttaatgtatatcagtcattggctagtgggaactccaagacatttgtcagaggatgggctcttactggatgaaggcaatcctctgtggaagagggccgctgagagctgagagcagacaacaggaccgcactggggaataagtacatcagcccagtgagagcctctgggcattgcaccagcattcattacagctccttttccttaaatatgtgaattcatgacctgtggtttcccattagacaaggctgatgggaatattctcttccccaaggggaatgtatagttttcatgacttcaaatatggtctctaattttgcagaacaaattctttcatgggaagacacaccgtcagaaagttaagttttgacacaagtacaaaacctcggacagtgtctttgaataataaagagaagaaagaacaactcttcctggggatgcctgtcctagtgtaagcaggttacacgagaagacaattgtgtttgatggtacaagaacctgaattctggaaccagatagtctctgcttgaattgagattctgtcaccaacatgctatgtgaccgtgagcaaataatttgacttcctgtgcctcagtttcttcctctaaaatgtagataatgatgaataataatagctattggttgttgagtataataaataattcagtgtatacaaaggtgtttgcacagtgcttggaaacacaggtaaagccatgtaaggatggctcttgtaataggaaagctaggccttgaaatgagaggtgacaggtgccaggcacaggataggagaggacaatggttaaagaagtccgtgttctctggaggcagatattctagaattaaatctctgctcttgaccttgagcaaattacttaaattctttttgcttgtttcctcacctttaagcttggaataatgatagcacttttcatatagaaacatagtgaaaattaagtaaaataatcattgtcaaattcttacaatagtacctcatacataatacactttcaataaatactcttgttcttgttatgtaattattattccatgagggaaggcagggaactttttcagcgaaaggagaaaacttcattgggacaggttcattgcttgtacacagcagttttataagatgagtatgagattgtaagataagtagaagccgagctggcaaatccctactgtgcaaagctaaggtgctttgacttggttctctgtaggcactctgaattcattgaacatcaaatacattttcccaagtctctttcagaggaaagaagtggtacttgttatctaatactgcataacaaattatcaacttagtgtctaaagacaacacctattaatttagctcatgatgtgtaggctgaaaatttgggctgcaatcagctgagagactcttcaggtctcagattgtctccttcttgactctgtgttaattttatgcttagatgggtagctctgcctgaaggttttgggtgggtactggtttggagcagcttggttctcctcatgtggtctctcatcctctggcaggcaaacccaagcttgttctttttgcagaggcagtgtcccaataaagagcacacaatggctctcaaggcctaggctcagaactgcacagcatcacttggaggcattttattggttaaagcaaatcacaagctctagcccagagtcagagtgggtgggaattttaatacaaaattacaggggaaagaacatggatacagaacagccattaattcagacatcagtgaaaacaatctaacaaattctccaaggatcacttctttaattcatgagaatgggcagaggaagcaagtacagcattgctcctcccttgaaagtggtcaacttttgtaaggtcctagtaaggtcactggtagggaagggaagtgaggaaagaccaacttgtggaaggtcctgggcaggaatggttaatctaaagtggtgggccaccttggccttgctatttctccaaccttctcttctgtgcatttcatagattggcagttggcaccagcaagagatctggttgggcagaaaccttcatcctggaggatgcaaggcctcacaatttcacacatgatttaaaaagaggcattcagtaccaggataattcattatgaaaaagaaaggaagattttaatatataaaagcagaacttttagaaaaaaaaaatttagactattctcttccatctgtatctctttattcagaaaggtagagaatgaataaatttcataaaagactaaaggactaaagaatcagataatattggctatatgtcattggttgataaagaagagtacaaagtaaatatttgaactctacactgtcatacatgtttaatataatttataaaagctaattttcatgtaaccacttaaagtttgtatagggaatatatattttattgaggaccattcacctgtaaggcaagaatcaattggtgagcataggttaatataaagatcaatggctatgttatgctgatattgaattgggaagccaaaacttaggttttgaatccaagccttgcctgggtcccttcagttacacacctaagctctttgaacaataatttattgaactgggctatgacttggtttgggttgacccagaagctgcccttgaggtaagaatttgagtacaagtagagaagggagcccaggaaaccctggcagggaaggggattgaggaagcaaggcagcaaagggagagcagctggtaggagatgtattatcagggttaccaatgcaggcacctggagcttaatcccactgaggaagcctgggagtacggcagaccagatgcctcagagatatcctgtgtgtgagagtagggagctggggtgtttatacacccactgccatcagtctttggttcagggctgctcccaggagacgttacttgcctggaatgtccagccagcctatggcagaggaggctcctgcagccagcgaaagtctttaggcaaagatatgccagtgatgtgcatggaaatggtaaatgctgacggaatgtggattgtgatttgacagcatctgctccaggctaaattccgattttcaagtgttttttaaaagtagatactcaaattattttataaaacataaaacagcatacaagattgatttttaaaaaaggagttacaatattttttgtgatcgtgagtgtgtgcttgggtgctcaatgctttctctttctctatggtgctaaaaaccagctcagaggtacctctgagaaatgcaagggcttcttgaaaagtagcttaaaaacacctgatttccatctttaagaacatttccagttctagctctctgacatttttgtaccaagctgctttctgccttttcctcttctgttaatacctcttctgtgccctttcctcttaaaaacaaaatcaacacaaggttttttcaaacctcatagccgggcactgtggctcacgcctgtaatcccagcactttgggaggctgaggcaggtgaatcacctgaggttgggagttcaagaccagcctgactaacatggagaaacccatctctacttaaaatacaaaattagctgggtgtggtggcgcatgcctgtaatcccagctactcaagaggctgaggcaggagaattgcttgaacccgggaggcaagaggttacggtgagccaagattgtgccattgcactccaggctggacaataagagtgaaactcaaaaacaaaaacaaaacaaaacaaaaaacaaaaaaacacgtcataaaaaaatccatttgaatttcagtggtaatgggggtggtgggttgaaggctcaaaatggggaatacacacaacaaaatgttacaaaacagctaattggatgactgtttaaaacccacagtgactctccaggagaggtagtcatagtaacacacccaggaatatcctcccagtatgtgtggcgcaagctggagaaggagggtgggtggtgcagagggcaggggtctgctgggtgaaggacttaccagtacagattccgtacacagactgaaaaggaacagccttaacagaagctgtgaatcccctctacaaacacagacgtttatctatattttaggcaatttacttgtggaatcaaaagttagcctctttagagataacttatatgaaagcgtttgaaaaaaaaaaataacctttgataaaattcacactataaggaaaaaattaaaaaagagaagaccaaatggaaactgtgggtgatatctgtgattgtgccttttgaagctgttccttagacattgctctgggtttggactctcatcgtgttatattcacattgactgaaactgtatgggagccccattagatactgtagtaatagttatgagtgcctgcctaatgctcctctgtccagcctgtgcaccagctgtggtgaatagtcaaagctaatgactcacagatgcttcctatccagaggaactgcctctccaggaaatgcccggaaagctatgctcttcctagagccccaaaccaatgactgatcctggggtataaaatcttggctccttgcctcaatttgggacataactgtggtaccctttatccttacccatgggatcagccttaagccagacaccagctggaactatttcccttgctcagctccttcctatgttccacccatttccctcatgttcttaaagattttttctaagactactccctcaataaatcacttgcaaaatatctcctttttaggacttgtttctaaaaaccctatcctagacaggcatcttgggaatagccgtgcaacagggtgagtccatctgctttcaggcccttggtctaccactggggagctatgagaccatgtgcaagtgtcttgatctctcaagcgtgcggttacacaatggtaaaattcaactagatcattgttgttattgttttcatctgtacccgctcccttgccagcttcttccctgtcttctcttccctctctctcttacaagtttcttttgagatcactcaatcaatatgtcacttgcaaaaccccaaacatgaggctttgtttctagagaatttgaccaaagacacatgctggtggttgggggtggggggcaatgtgttacctgtagcccaatgggagccacctaaatctatgagtgatgggtacccttccttccccactccatccagaatgagtcctctttcgttggatttactcataagatttccacaagatttctggtaaaatgagagctctttgttgctaatatctgaaatctgttggaccagatgatctctcaagtagggtgtggctcacccgttctaagacggctttctctactacttacaaaataatggtgtcccagatttattgggattggagaataaatgggatcaagcaagtactaaagaaaatgtggttggctggaggaggctgggcatcactaggaaattcttcaaattaattctctaggagaaggatgatttatatccgtcagcttttcaaagtctgccattttggggctgcttccctgaaaaactcaggcttttcatgccagagtagataatattgttgtcctgcctagatttcctttactggacctaggcattcatcctctaattgtccttagctaatggcagctgtctcacctggagatgcttgggtgtttatcccctgctctccatggccagaaattgtcacggacaatcactgaatgatgttggaattttaaagcctgtcgccttgctaccagttgagaccacactgtgatgtaatacacattctagagctcttcatagtatcaggctgaagctcaactagagctgagaccacattgttgctcagtccctttctgactctattctgcctcctttgctccctcatgggtatcttctgacagcattccctcaaaaagtcatttgcaaaataactcctaggtgaggccttgcttccacagaactcacaagctaataattcagagggttgagggccacggggagtgagatttggctgggaactgactgcaaattgtcaatactggagttcacagtaaacaatcaggagccactcatttagaaagccttgtattttattctcctttggggtttccccaaaaatctctttaatgtgtgaaaataaagagaaaaaagttttccagtatgcattcttattcaaaaaattggagaattgtttttgtttgtaggtcttattcacagttgtatccttagtgtttgtaacagggggtattcaaatacttgttgaatgtaattgaacatatattcaacaactatctagttggtagatttttatatttctgagttcatttgggatacaataaaggtattaaaaaatggtcagtttaagaaatagaatacatggttaacctacttttaagtttattaattttgcttctaatattttcattgaagtagaacaatcttattaaatactaattatcatctccattcttctgcattctgattgttttgttcttttagagaatatgcttcttacagagaagttagctgtattcagaattgtgcattcaaatatccatcatatctaggctctaagctacaatttctctggactgcactttactcaattctaaatgccattttaaaagctagttttgacatttcttcaaaccatctgaggtctctagtcctctgggaagactgtgtgtggtgctgagtgactaatatggattcaactatcctttgaatggtttacagagcaggccatgatatcaggatttttgagaatttcaatgggattaaatctggcaccatttctgctggtatctttctttatcaaggatgaagtgcatacattacttgatggatacagagtagaaagaaaatcaatttagagaaatttggacaatatgttattttgatttccttttcactgcctcagttacaacttttggatggtagggaagtgcagagccgggatttatctgaagtgcaaaatttaagaaggtgccaaaaaatcgagtaatcaagaaatatagtattttaatgcaatttttaattatagtaaaagcatttaacataaaatataacatcttaattatttttagaatacagtttaatagtgttaagtacattcttattgttgtcaaacaaatatccagaaatttttcacttgcagatctgaaaccctacacccactaaacgtgaactccctttttttctcctctccacagtctctggtaaccaaagttctgctttcagtttctatgcatttgacatctgtagatacctcataaagtggaatcatacagtgtttgtctttttgtgactggtttatttcaatagcataaagtcctcaaggttcatctatgtctagcatgtgacaggattttcttccttttcaaaactgagtaatattctattacacatacacatacaagtgcaaatatatgcatatatatacatatatatacaacacacatatacaaacatatatataatagtgcatttatccattcatttatcagtggacatttaggttacttctaccacttagctattgtacatagtgcttctatgaacatgggtgtacaaatatctctttgaaactatggtttcaatttttttggatatatacccagaagcaggattgctagaaaatatggtaattctaattttaatttttgagaaaacaccattctgttttctatagcaattacctcattttacagttccaccaacaatgcacagaggttccaattttatcacatccttgtcaacacttgttattattttatttttctcaatagtagctgtcctaatgaatgtcaggtggtatctcatttggttttgatttgcatttctctgatgattagtgatgttgaaaatattttcattttttttggcaatttgtatattttttggagaaatatctatttaagtcctttgtacatttttaaattatttgatttttgttgttgagctgtaagagttctttatatattctgattattactccttttcagatatagtaaatactttctcctgttctataggtttcctttatactctgatgattgtgtcctttgatgcataaaacttttaagtttgatatagctccatttgtctatttttgcttttgttgtctgtgcttttggtgtcataaaagtcactgctaagtacaatgccgtgaagatttttgcctatttttttctaggagttttatagttttaggtctttaatacattttgagttaatttctatatatgttgtaaaataaaaatccaactttgttcttttgcatgtggatatccagttttcccaatactatttgtgttcattgtacattaagtagtctcggtctgtttgtcaaaaatacacggtggtttactttttggctctgtattgtattccattgatctatttgtctttatgccagtaccacactgctttgattaccatagcttcataatatattttgaaatcaggaaatgtgaggcctccagcttttttcaaaattgttttgagtacacagtatcccttcagattttatatgaattttaggaagaatttatatatttctgtaaaaaatgcttgtggggttttgataaagattcattgtatctgtagattgctttgggtcgtatgaacatcttaacagtattgttttccaacccatgaacatactatgactttacaattatttgtgtctgttttaatttttgtcagcaagttttgtagttttcagtatgcaagtctttcacttccatagttttctaaatatttcatttgttgttgttattgtaacgggattattttctttatttctttttagattatttattgctagtgtatagaaatacaactcatttctatgtactgattttgtattctgcaactttactgaattcattagttctgacacttttttgagtgtttttacatacaagaccacatcatctgcaaacagagatagttttacttcttcctttcctatttttatcatgagagggtgctaaattacgtcaaatgtttttctgtattaattgtaacgttcatgtgacttttatccttcactttgttaatgtcgtgtattatgttggttgatttttgtatgtcgaaccatcttacattccttaaataagtcttactggtcatatgtacagtctttttaacgggctgttcaatttggtttgctaatattttgttaaacatcttttgttaaagatgtttgcatcaacattcgttgggagtattggtctcttgttgtattgtggtgtctttggatttgacatcagagtaatactagcctcatgtagttagcttggaagtattttctcattttaaacctttggaagagtttcgggaggactggtgttagtgattctttaaatgtttaatggaattattcagtgaagccatctgatcctgagcatttctttgttgggaagttctgattactgatccaatacccttactaatgataggtctcttcagatttttctatttctttgtgatttagtctttggtaggcagtgtatttctaagaatttatgcatttcttttaggttatccaatgtgtcagcacatacttgtccatagtgttctcttttaattttttatttctgtggtattagccataatgttccctgttttatttctcttttagtaatttgagtcttctcaaatttattaagttgtttaaaattttaaagtcacagcattctattttaaactggtaataacaatttcaagttcatattaaaactctattcttttgcaggtctcctcttcactttacgttattgatctcacaacctacatcttgatatattgtttagtcattggcatatatatagtattttaaaaatgtttttgtcatttaaattatatgcatcaaatttacaataaaataggttagtatatttgttcatgtatttacctttactaaagaaccttatattttctaagcctttgtattactatctatggttctttcattctaagttgaaggttttcctttagcatttcttctagagcatgtttagtggtaatgaactctctcagctttcatttatctgaatacatcttaatttcttcttcatttttagaggacacttttgccggacacaatattcttggtagacagtttttgttttttttttttcttttagggctttgaatatattctcccactccttttagcctacaaaatttctgctgaataatacgttgataatgttatggaaactccattctacataacaagtacctttactgttactgcttttgaaattctttctttgttttttattttagataatttgattataatatgcctcagtgtggttccctttggatttatcctatatggagccctttgaacttcttcaatcactataccaatttctttcctcagatttgggaagtttacaaccattatttcttcaaataagttgtatgccccttaatctctcttttctttctggattttccataatacacatattggttgcttaatagagacccataaatctcttagacgttttttcacttttctttattatttttatatatactttttgctccgctgactcaatgattttaaatgaagtttcttcaatatgcctgattctttcttctgcctaatcaagtctgcttttgaatgctacaaatacattttcagttcagttgttgtatttttcagcttagaatttctgttaatttttttcatagtttccatctccgtggatatttttatcccatttttctaattttgtttactttgtgtaaataaaattttgcttaattttgtttacatttgtgttctcttttactcattaagcatttttatgacagcagttttaaatgctttgtaaagcagttcatagatctgcatttctttagggtcaatttctgtcttttgattgcgccacgttttatttactttataaaacatgggccatgtttttctgctttgttgttgattaattcttcccctgacctgtatactggctttgcacagacgaggggtttcaccagtcagcctggctgggagttctagaccctctcaaatggtttcaaatcttttcatcccccttgtgtctccctttggaactgcacctctagcatgctgtgtaccctgatttcagctacttccaaattctggcacctgatgcctcagtgctctgagtcaagccagatagaaaccagtcccccaggctgctcctgggcaagacaatacatggtccacccttttgtttgcatttggaaagaggagccctgtaagataggtttcctcccacttggtttatggtatgctgcataagagaagaggaatcaataggtatgccaaatgccctgatttttactacagatttctctggaatttcatcttgattctatatggcctgggtgctgcagcctcctacctggtctctagagttttcagaggtattttggtacatatattgtcattaacttggtgtctctgtgggggaagaagggccagtagcttcctagtctgccatcttgcagacttgtctggatgctcttttatgcaatatttttagaaatcaaagtaaatgcacagaattcattatagaatttcaaaattttaactaaaggtaagatcagagtgtatattatatttttaaagtaaagttcttagagaccactgacttgttacaggtaatacatctttaatgcaaggaagaaaagttatgtgtgatttagtatgttgtcactagttcaggctcataggctaagatggttgcaaccacttcaaggaatagatggaatcaccttatggaaaacagattttccattaggctaagatgcagaatttttaaaaaagtggaaggaaaacaatgtgttttcagatttttttttaaagttggaggaaaataatgaaatacgagaggtacattttgtcttatttaatatgatcagacagcttatggtcaacagataagcaaaaatgaaggaaaacttcggatggaaaagttagagggccaaagtgtgtgttacataatgcattcttgctaaggcaagttaaagaggatatttttgatcctcgtaccttaatactcaaaggagaaatgcaaattttgaaacaaaagatatattatctgttgtaaaatgcatcttccattttgcaagtccgtttggaaaaaggtagtaactgaaaatttaaacagcaaaattttaagtcttattaaaaatttgtctttgaattgtccctaaattggtagataagtctgaattttctatactcaatcctgtccagcctctagacttctagatctcctctctctggctcatatttctctgtgtacacctgctcacatttatctttgctcaagtctaccctcaggaagatttcacatttgttaagaatgtaagccagtgctctctcctgcctaggctcttgcatttagatattatttcgctgcaagagtaaaacagcctatttacctgtcaaagggatttcagacctcatagaggagattgtaactgctagtggagtgcagttgggagatgtcacactttcaattttgcttctgcaaaggctgctcttcgtaacattgatcatgcaaaaagagctactgatgagataatctttcaaaagtatatgagatcgaaatgatgttttatattgagttgaaccatctttatagagaaaaaacttgatatgtctgtaccattttttgacatttgttttctaaacagtctgaggataatcagcaacaagtattttccaagaaccctcagacagtttggtaggattagagacatgccaaactgacagcctcttagaattaatggttctacctggagtaagaatgccacctcaaaaatattttatgaacatatccacttatttttttagttaaaacattcttatgagcttgtaatgtgtgccaggcattgttcctgaaacttgctttagagaagataacagataaaaattcttgtcgtcttggagtttacattcttcgaattagaaggggagacatagagaagacaataaacataatacttaaatcttattgtgtattacaagatggaaagttccaaggaaatcaaagtagggcagggtcaggggtattgagagttaggagggtggtgcgagtagactgcactcttaaattggtgctcctttgcatagcaattcttaaatacccctttctttgccttctgtaggagtctacaaagtatttttttcttctgcaaagatccagaatataaatattttaaactttgtgggccatatagagtctctgtcacatttttttttgtttgttttatataaacttttaagatatatatatatctttaagatatctttaagatatatatatctttaagagatatataaagtattctgagctcctgggctataaaagaactaagaacagactgcattttgattttgatcatgggcaggagtttgccaacctttgtcccggaagacatcaaactgacaaggtttgccatggaaaagggaaaaaggttgttctaatgacttgataaagcctctatgattagagtagatatgtagagaaacaagagtcccaagaatgactccacatatcctgagtacctttaacttggccagtaagagcacacttataatatccattatttttaagacatagtttcagcaatacaaacccatttttgacattgaatgtgctaccatatttctgttaatcaccgatagaaataaggggctggcttgaagtagccatgtctagagtaaagcccttcctgaaacgtgctggttgagaacatttgactgtgttttctggattagcaaatggatattgccttcaattaggcaacacacacagtaacatgtgatatactgaagcatttttatgggcaatcactggcttataactgtgacatttttggcatcttgacaaaggtggctttaggttctttatatctgaggttgccaacttagtcgacttgggaggcaagcccttattggtttccaggtttgtcttctaagtcagtctttagagaaagcccagatctgccaccttgtcaaggtgtgggtaggatctggctgtgtctgtagtatgagatgcttataaacatgagacaagactaagagaaccaaacatgagtgatggaaaagcactgcctgatttgatgcttgtctttgtctctaaactcagcttcctacttgcccaccgaactctgcaatcacctccaccatatctgttgccagcatatcctaaccttatttcttagcacctttgcccttgctatctcctctgtcctcagcatgttcttctttcagataatcaaatgccatgttccatcaaccctccattcctctactcagatgccacctttacagagagccccccatccgtggtcactctctctcaagtggcctggttttattttcttcatagctctgtggcatgtgcatttggtgaatgaatacttttctgtctgtcctccctagcatctaagcgccatgagagcaggaatcatgtgcccccatggtccaggagagtgccagacacagagctgatagtcaggaaatgtttgctgaacaagcaaagggaaacaggaagaagatgaaaacacagatgcacactggatacaaatgagttcccctagataacgccgtcacctgggatatcacagaggaccacatgcagctgtggttcaaactgtagagaacataagagactcctgaaaagaacagagcttggtgtgttgacttctaaaagctgttttatcggcatgtatcaattagaaatcttgcttagctagcaattgattttcctagcaatgatgattaagtagcacaagatgtaaaaatgctctctgcgtcatcaaagaaaattagattctgttaaacacagaacgtttgttagatgtatttcctaattatttgaaaatctgtgagtctctattaatcaggcaacgtgattaactaggagagcttgttccctggcctcgcaaggcaacactgggtttgctgtaatgtgactgcttaaagccagcaagtctgtaaaaatgtccaggaggaagcaggaggcaaatatattttaactattcatgagttgatgtaaaagccaattgtagggaaaattgatacagaaaaaaaaaacccaaaaaacagtcagactgattcttggtgtttcacactactagtaatatccagtacaaagctatgaaattacagataatgaaggcttagcaatctgctattacctatcacctctagctgagttttattccttcttccagtaaattaacagagaagattcttcaacagagccttacttgggaagaatagggtttggaggaagagagtgaacagattgacattgctcctggctgtccagaaataaccaaatggaacatcttgcaccttgtgtggcaagccaatcaatatcttttttatttcaaagtcataaaaatttgaatatggaaactgtactgtgagaactggaccagcaggggacatacaaataaataaatagcagatatcaaagttcaaatggccatggcaatttcctcactgtttttgttttttgttgacctgaaattgcagcatacgcctaataagtctttgatatgaagtgatgtatcactgtatgaagaaagaattcataatgactctaagtcgctgtagcagcttcttttgtaagtggggtaaagagaacatttgagaggtaatgagttttaggcccaatgcacttggggtggagaaagttaataaccacagggaagaagacattagtaaaagaagccactcttattcagaatagtagagagggttttagctcagaacgtccagagtgggaaaagaaaaataaaggggcagggcagaaagcaacacagtccatttaccttataatagaaacataaaactcattaaaaaaagaaggaaagaaagaaagtgcatcttggtttctgtccatcaggtaagaagcttggaagctgtcactccatcctaacaagtaaaaaactggaaactgaaaatcaacaactcttcttagctatcggagaattgaggtcacaggacaaactgctgccctaaaaattgaagaaacagacaggcagatacagaaaattataatttaccagagcagaaattcacaaagagaaactgctgttcatgagaaccagtaccagggtagaaaagccataactgtcattgatgaattgctggaggcttggtgagaataggtcagagaggtaaaaaggccatggggacccagccttagagggcacttaggcttttgtagttttatctctaggagcactactgggtactcagtaaagactggagaaatatcccttcatacttcccagcatgtagccagtttaaaatactctagaacattctgttcttaacaagtcctgcctttaagaaaaactattcgagcccccagttgatggaggtagcttacagagtgcttcagcactgtaagagaatcgttctgtaagagaacgattgtactgtgggggtcacctgaaccgttcacaatttttccaagaaagaactaaacctttgtttttttaagccaataagtgacaatctggagttttgattttagaaaaactgaagctaaagaaaatctcaagggtaagtgtggcatgattaattagcctatctaccatgaacaagaggaagcattgttcttgtatttgccaatggtgagaccttagcatagtgatgtccgttagagattttctgcactgtccaatatagtagctattagcactagtggccattgagtacttgaagtatggccagtgcaactaagaaattgaaatttaacataatgttgatttagccgtgtatggatcatgcttgtcatattgatcagcacagcacataccctatttgcatgcatattctagatttggtagggtgaaacaaagagcacctggatactaagaagaatttttaaccagttcttcctacctttaaaaaaattactcaaaagtgaatacttataacatgattcttttgtaagcatggcctattttttgaatttcttgagactgtagggtgaggaaagtatgcctagtagttttaggcttcaaaatataatttagtaaaaaatttaaaaagtcatgattttcaagatataatctactatactgagacattatcccttgtacaaagtgttgattttagaatttacctaaaagcaaacaccaagataagggtttgagtggggacgtatttggtgatgtgatttgaagaagcacaaggaagaagaaggagggccaatgaaggggagattaatgagtaagccatttctgtgggtaactgaggttcaatcctattgagaccttcagagagattgtacaaagtatgcttatcattgatcccccaagaactgaagaagaaggggtatttatctatttactcatatgcccaattagttaaaaggtaaccctgagggacgttaatatcccagaactttcagcgttttaaaccagagctgcttatttgccaaaagacctcaaacagaggtagacatggaggcttgagtaggaagctgcctgcatggtcaggaattgacctccagagctgcagatgtcctccaggatgggctaagaacagtatctgctaaaatgtggaatatcataaagctcatccttggtctcattgaaggggttggccttctttcagtataaatacctaatcagaatataagcaaaatatgaaataggaagctctgtctcctttcttatttcagagtctcaatgtccagttgactgcttagttctatatgctcttcccaataggagctcaatgtgctcaggctcccctggtatttcctcactcaccttagcccacatcacctacagtacacggcacctcacttataatctgctcttactaaatggtccatgctgcagattatgtaaatacatccaaatgcattcttttctggctcattattacaggattctgatattagatgtgagaagagctataatatcacgaaaagcattcatattcagtgatatccctcaagaatatgagttctaactaagaaaagccaaccatagaaaaatctagaaatggtgagactttatccattaaaacaggtcagtagagatgctagatgggccctggaataaacattgtctcttccctacccaatatcgacagccctctatgccgcctttcatcttatttcagagtcatgatttctcaagatacagccacaccaggatcccaagaaatataagcttctaccctagttttcaggggcaaatcatgataggtctagacctgtgcttgtccaacacaccgtcccttgcttcttgtagtgctagagtacttaatatgtgcatagattccactgagatgcacttcaagtgtaaatgtgaaatatcttgttaataatttttatgttgattatgtaatgaaacaataatactttggatatactagatcatatgaatacatcaataattaatataattaataaaacattaaaatttattgcacctctctttactttttaaatatggctactaaattatttacaatgtacatatgtggcttgcatgatatttctaatggacagtgctgttctaaacaaatcatgatgatctcatttcccatggctagtaatcgattcaggggtggcaatgtgacccagttctctcgagatctaagaataaatacgtgtgtgtaactcctgggaaagtgcttgttttcttgataaaaataaacagttttggctggcatgtttctctgttcttttactctcttctcttcctttgccctgaaacacagatgagatgcctgtggtgtggtagccatgttgtgactgtgaggcaggaataggccaacaactttaaggaatcagtgtaactcaatgtgaaaggtgttgggttttggatgatattgtagagcacctgcatcaacactggactgtacttctcttgacttcttgataagtctctattaatttaagctctgcgttgcattcaaggttttatttacatgcagataaattgtggattaagggcagagagccattccatcatcctccatttacactcaccatacttaagggcaagccatttaaagaaggcattttgaaggagttttaatcttataaaatggtcttcattcactactagagggcagtttactaattatcttcactcaagctcggtgttatttcacctgtctatgaagagttgattctgtatttgtgtttacctaatatgtaaaattatttcactatataatcaacataaaaaaattaacaagatattttactatttacttaacacttgcagcacatctcaatagaatcttctcacattttaagtactctggaactacaagaagcaagggactgtgtgttagacaagcacaggtatggacctatcatgattggtttctaaaaactagggtaggagcttatctttctcatgatcctggtatgcctgtttcaggattaggctagtcctgaaagtgtgggtagcagacattgttgctattctgcccaggtccactttgcagggttagagtaccaatacctgctgctacaagcagaagttgttaacagctcccagctgcctccttctccagagggttcctgtcagcctatgagagtcatctcacctagaaataactgagagattctatgttctccccttgcggacaacccagagctaatgactgacctgtaaggaagacaaaaaagttgactctcttttctccagttggaccaactctgtggtagcacgcatgctccagagcaccctgtgggacctaggctggactccagctaagaccacatcattgcttggctccacatcattgccctgtcctgcttcctttatttccgttatccagagagctcttgctcagtaagtcgcttggtcaagaacccttgcctcaggctctgcttctagaaaatctgactgaagacatatttttataagaagttgacactcactgttttaatccattaatcatgaagaaaatttataagtgcaattaatgatgttatatcaacgtttttaacatatcctggaatagctaccaattatttaaataaattggtaaaacaggtattttctgcttcaacaggtaattcttcatgaattctaagaattcataaagctactctttatacaaagaggaaggctattccactgtgtaaaagtaagatagtatgccaaatcctacataattttgtgttgctctgaatcttcatttcacttaaaaatttaaaccatctacaagcagcatattcaaactaagtaaaatatctttgctttaaaactacttttgctgtacccctaatgaatagaatagaggaaccatagacagaaaagggttttgagattgtcacaaaattgatttcatgctcgacaggggcatgaactagcaaggatagttctttgtaatttcagccaggtgcccaaaggaaatcaatatgtagatatgaaaaacataactctacttctactacagagtcaggcaaagaattctggtggcagagtgactgggtaagagattctaattagggaatgggaagaaaaggaaatgaatatgctcccctaaggatctgactgaagggtgaagttcccattcatttgcattaggtattgtagtcaaagctggttttgttccctgagtcaagggagaactatggatatgggccagatttaaatgtgttttgtgtagcatttcctgtgctctctcatctttacattgcataatttcatggaaatgcttaaaatattttgagaaagtaggttataggttttatgttctttggaaaaataaattgcacatatctggaacagggctgctctactgttttggtcattaacattatcagtattgttgtgtgagttcagatgaatctataggctatcttgtaaagatgaaggatgtattatctagagttttttttactaatttactttcacacaagcaccctgtggctatttttatttattcagcaagtactttaaagctcctactataccaagacttagtgtgagactttggcgagatcttatgacttcacaagagaaaaaaatatacaaatagaattccagatcaacattgagagagatgtatgttaaaagacaaacatgtgaaatgccctggggattaagaagagaaaagactatctttagctactactgtgaccactggaggaaaaggtggcaagtatctgaaatcattattgtagacatcacgctggatattattaagacagtctacatgttaagcagagataaacagggctatgatttaatgagttaatctctctcatatactaaaatcacgcttctaactattttaagtctagaaacttttcacaaagactgaaaatccaggagttatttttcagaaaacttccaaggatttcaaaaaaatgacttactaaatagaaagctcttcacaaaaatagctggagacaaagtcccaaagaaaagaattttgatggcatctatttattaaaagaatgtttttttccagcatcacttcaaagtgaagaatttcattttgaggagtcaaggttttcagggacagaggtttctaaaaatcatcaaaaaccaaaagagaaaaagaaaaaatacatagtcacatctcatctctggatttctgaaacaatgaggaatgagagcggggagcgaaggaaggagagagaaggaaaagaagcacagatttactaattggtttagagaagaccttatgctctttacatagttgaccatattttcaaaaagaaaagtaaaaactttcattagcttgaggatgaaagtaaggtagatattggagagaataaaaagatttagcagacctcagaatttttacttttataacactttctgcttttgagatttgcaataaattttaggaatttgtttcttgattctatatgtagatgagctttattttaaagcagaaagttggtcttagtactctatgcttatataatatttattgattcatcaactaccgggtgtttaccctgtgccaggcactgtgctagacatcagggatacagagatgagatttagtactcacaagttgtaatctaaggtgacaaacaaattcatctctcatatcaatactaataacactgaatatataatctgtttcatactctactaaacaccatatattggatttatgaagacgatgggtttttactattaaattagattcttactcttaataaatagcccagagaagttaaatagcttgcccaagatcccctctgctgaggttaggctcctaaccatcacactatttgtgtattatttaagagctatgttagagtctataattatttttgcaaaagaagtgagaaaccctgcctgcctagagttggggatgggggaaggaagagaatttgttaaggctcttcaacactggaatatttgagatgaatcttaacaaatgagtggctgggggcaatgagaagagtgtatgcagaaactcagcaataagagcaaatagctcaggatgggacactgaataagctgggaagaggggcaagagataaagctagaaaagcaagcaagattccagggaacctggcatgtcttgcttgtaggtgtttgacatgatcggggaaggttatatgttaaggcacgttccacagaagcaggctgtgagacaaggattcattcagctataaatgatttattaaggcagcactcccaggagaaactggatgaggaaagaaggacaggaaaggaaaagaggctaagcaaggatacactttcaggtagagtctcggtctcagtctgatcccatgtgggagctctggagtctagcatacatctcagagtaaattttgcataaaagcaaatattctgggattcctactgtcccagagagatataaactcccagagacttccagttctctgtgaatatgggaaaagcaactccagtaacccaagagtggacctctgaaaaaaggtgcagaatgcagtcatttatcagcaaagcaggcagaaactgggacgctgtgaacagaacatggacagggaacatcaatgtctgtcacagctggtaatcccataactgtcattagaatagacattcaattagaatggttgtcattagaatagacatgtctattcaaagacatttaaactcttgaattgaaacatgttaaagtctccaggaaaaaagaaagttgtctattaagcaatgaaagtaacagaggcagagatgaaaagcctgtggaattataggcgattaggacagaaatcagaaggaagcttagaaattacccagcctgaggactatgtatagatgaagaaaccacaaccaaggaaatcactacattcatataattagtagaagtttttttaatttggtaaaattaagttttaaatttggtaaagtgaatgtgtttccatatgtgtatcctaggaggtagaaagaggtgggaagatgaggtatcctagaaagagacttctccaaagtctctttgggcattttgccttaaaaaaacagaagtttttcctcctgtttccaaattgagtctgttctgtatcctattactttctatcccacaactttaatgctgaggagaccttctattctaactttaagttgaaaaatgacaacatctatcttaatcactgagattttaattgattaaccattccttgtcagcctgagtatgtttcctaggctccgttgcagttaggtgtggctttgtaattgaatcctaggctgtaaatagagatgatacagctagaagcaccacttccagaccttcccacaaaaatattcaggtagccttctgtgttcttgtgttccatatgctggccataatgaagagaactccaaggaagtgaaaaaaggtaggtcaacaaaatgacaagattctggatctccaaactatgtagagcaacccctcctccccagctcaactaatcatcccacattgaactataacatgggcaaataaatagtaaacacttattttggtcaatgacctaaatttggacttgatttgctacagcagttatctacccctactaatatataaaattggtgagattgatcaaaccttatcaagtgccttttgagccactctaaggcaccaggctggtatagtaggaaacccaaagataaataaaacatgaccttcttctgaagtgttctgtatcatagccagtgagaaaagacatgaacacaggaggagaggtcaggacaatagatgctattggaattagaagcagtaataaaacactttgggttgcatggatgatctttcaaagaaatagtagcttactaaaaccttaaaggattgatcagtatttttgtaagttaagatggtagagtgagagtcagtcacatgtaggaacgactgaaacaatgacaggatgtgggagtcctcttgggatgtaatcaagaagtatggtaaaacaatggaaccagatttttgaggacattgcattttaaactgtgtggtttaatcaggtgtctgttactagatagcaagtggccccaaaatttggagacttaaaacaactatttattatttattacaggtctatggtttgcccagtagagtttttctgctatggtacaagcttggctgatcttgactgggctcgctcatgcattggcatttagctaaagggtctgctggagactggctgatctgggatgatctcagctattgcaaattgtccctattctttgtttcttaagttctccatcatgatagcctggagttatttttatatcagtagcaggagacaaaagagaaaaatctgaaatgcataagtacttcttaaagtctctgcttgcatccagcttgcttctgttctattgcataaagcaagtctcatgatcaagcctagcatcagtatgggagggtgtaccacagggtatcaatagagggaagtgtgcaaaactgggactattaatgccagtgatatccataattggtatatgcactcaaagatgtgaataaataactctgaaactagaaccacctggattcatatcccagctgtatgatcttacgcatgatatttaaactttctattcctcagttttcttatatgagaaatggggataaactaccacctatatcatagaagtgtttgaggatctagtaagttgatatatgtaaagtgttcatagcagtgctcggcacatgttaagttctttccatatataagttagttattaccaggtcaattttagaaatttggtaaagtgagtgtgtttccatgtgtgaatccaagaaggtagaaagaggtgggaagatgaggtatcctagaaaagacttatccaaagtcttcttgggcattttgccttaagctaccccagagtacaattccagttcctttattagctggtggcatttttgtagatagtcaaagtccaatttctcttgacaaagttaacagtcaaggaagagtttactcagggctgttacaatagtggagagaggccagatctgagtctgaactaaatatctctaaaacaaaagatgaagagttcctaagagctgaggtgagaggaagatcataggtcatctgtgtgtgctaattggttttatccaaattaaatataaccccttcccacaagatcaacaaatcctcttgtgtcttcatgacgtgaagcagttttgcaactgggaaattaggcttcttcccttccagaggaactgggagatagaggcctgtcctccttgatgatcacatttgaaagaaatggttcccagggccttgagaaaaacactcctgggttggaaaactggcaagatgcttttacaaggctttttatatcaaagggacagtgaaaggttttacaactacaagttttataaagtaaatgctctaagaaaagggagatcaggggactagagctgagaggacacctgattaaattgtagccaagctgagggaatgttagggctttcttggtcaagaaaatcttgtagagtttctatgcactttaccacttcaaccttaaactgagaaattaaaaagattcagtagatggccagtcagtaactttttgtttaacaatatttcttgtgggattttaaacccgtggtgggtaactactttagacactaaacagggccctggtgaatattcaaaatgcctatttcatggccacggacactctaaacaaaaatgttttacatgaatcaagaagagaagggcatttaaaatgtttagagccaataacattaatcaaaacaacgagccaaaggaaagaagaggcactttaaatttccataacatattgtaatatgtagtttgtaatgcatctatgcatttctttcttggaataacatgcttcttggagcatatttttatttgaatctggtagtgcagatggcacaggaaagtgtgagtctcttggggtgctgagaaaatgagagggttaggctggaatataaaatgagaaagaaagacctatttagatggtaaaggaaaagaggggaacaaaaaatgttgatgatgagatctgaagggtgaaagagaaaggtaccttgcagagtagcatggacaacatatttgtctacctaagcctcctccatatttattttggaaaactcagtaccattcccctatatagggtaactcttcttccctcggtttcccatggagtaattttacagaggacagacaatgctaagacctgaatcaacaggagggttgggtgtactactcaaaataagctaaacagtggtgttcaaacgatgtagaccaagatggatgagacattgtagagtggccaactgtcctttttttcccatgactgaagagttttccaaggaaatggggttttaagagctaaaatcaggaaaagcccagaaaaaacaggacacttggcagtttagatgaacgtttctgtggctcacgatcaatcttatcttgacgaataaggtagaaaattattgtagtcaaatttgtcagttttcaaatgaaaatcactctatgagaaatctggtggagatctttgctttaacacccctcacgctcaaaccaatttagttaagacaagcatacgagttgggatactaaatgagagattataattttagaaaatgtgaaagggcacatctaatattctctacttacaaataagatttcataaaatttctcccatttagcaaaaagatcacatcacacattaattaagccatatcctcatctctctccctaaacttcacaggtacacatagagaactatcagtgaggtattacagagaatggtaaagaaatagcctaaaatggttaattgcatctacattagttactaatatattgtataccacccaattctgcattcagatggtaacacttctctaaagcctaaagtcttggtttgggttctccacaaagcaaaacctgagacaagaatatcagtggaggtcatttatttggaagtgagtcccaggggcaaaagtagggatgtgtggaaagtgggataggaaagagagaaaagccaagaagggtgtattaatcatctggttgctgctgtaaaaatctggggctcagtcccgctgagaatttgagaattatgtagaaaattccccagacttataggaagatgaaggtgcaggaatatttgtccagtggctctcttcaaaccctagtggagagctgaccctgagggtgttaatggccggagcattggggttttgcagtttggcaatgtttcatggctaagatgcacacttcactgacccatgccccacccccattgtgcagaaattaggtgggccaaggcaatgagatacaatgcaccagaagcatctgctgcagcatcctaacatttctgcatataaaatattttccttatacagtcaccctacagggacctaacataagctaatgaagactcttgaagaccgtataggagcaataggcttatttactaatgatcaattgaagctgagcgaagttaagaagtgacttaaaaccgcacatggactcttggtagagaaagataaaaaactgaaatttttttccttcattccaggggatatctgttcacactgaatgtgtgagtatagccaaagagcctggaatgtgggacagctacaaacacgattttgatattaatgtgggaatgattcagagtttctcttctctcatgctttgaaaattattcttaatagaaacatttcattgtataaaagcaaaacaacatgctatttggaaatagaaattgtgaagttgaatactgagcacagtacctacttactgggaaacatcaggcaaaaataaaatgctttcgtttagtttcagtttcttcatctgtgaaatgagtacggcttactctgtctcgaagtacgctgctgaagattaaatgaaatcaattaggtaaaaagcattgtaagtcatagctaccaatgttgtcaatatcattaaaagtactactaaaaatttccccaagtgtgactttttggagggtctttgaatctgagttctgcatacttgctttccagtgcccctccatactgcaaaagaccaccatggatatggtgagacatgcaataaagctaaggagcaaaaattagaaatccacaacaatttattgtcaatataacaacatattgattatttattgactgaactttagcacatgaaaattgtgtttgcaaataaatgcagactaacccaagaagggcaacaatggtttgttacaaggggtaaaacaaaaagtatcttagactactgttcatttttttggttacagtgttccaaagagcccagtgagtttgctgtgggtttgtgtgtttctgtttaactatatagcaggccccagagaatacaggagacttttcatatctttgttgcacgatgccttccctggaaccccagagaatggctttgatgatttactctcacaatatgcttgaaaagaaatcagcattgtttttgtttggcatattttttttctttattctttctggtttaaaattgctctattaagccatatgcaaaaaaggctttaccccaggccagacagatttcaatgaaggaggttaaaaaagagctgagttaaactcactgttacatcaaactcaaaccttctaggtgataatccctgaagtcaaatttcaaactctagtttttgttaagcagcctgtaggcaactccactaataaaagcctcttatcggtattgtatatcaaagttcacagctatgattcaccaccattatcatatgcacaatttatgaacagtttgatataaatacatattttttctatgtattggtgggctggagtatgcattgaacttgaccattgacagctcttgccaagaactgaaaggccagcaattaaaaaaaaaaaaaaaaaaaacccaaaaaaaccatactactggtacatttaccaacaaggatgggtctcacaggtattttgttgagtgatatggtttggctgtgtctccatgcaaaatctcatcttgaattgtaatctccataatccccacatgtcaagacagaggtaattgaatcagggggcagtttccctccttgctgttctcatgacagtgagtgacttctcatgagatctgatggttttataagagttcagtagttcctcctgcattcatttccttcctgcgccctgtgaagaaggtgccttgcttctcccttgccttctgcaatgattgtaagtttcctgaggcttcctcagccatgctgaactgtgagtcaattaaaactttttcctttataaattacccagtctcagccaactctttatagtagtgtaagaatgaactaatatattgagtgaaaaacataatgagacaaaaagaactcacgttgtatgactccatttatatgaagttcaagaacaggtgaaattaatctatggcgatagaaggcagagagtggctatctctgggtgagtgtatacagggggggctttagagagccttatgagatattagaagtgatctacatccttatttgggtgataattatgggggttgcatatatacataaaaatcatgaaacggtacacttaagattcccagcttgtacactttattgtatgaatgttacattttagcttaattacagacacacacacacacatacacacaaacatgcacatgatgagggacccagataggtaaagagtaggttattttaaaaacaactagtttagtggttctcaaatctatctgtgaataagaagtcacctggagagcttgttaagaatacagattttgtctgggcgtggtagcttgcgcctgtaattccagcactttgggagatggaggcaggcagatcacttgaggtcagaagttccagaacagcctgacccacatggcaaaaaccccatctctactaaaaattagctgggtgtcgtggaaggtgcctataatcccacctactcaggaggctgaggcaggagaatcacttgctcctgggaggtggaggttgcagtgagccaagatcatgtcactgcactccagcctgggtgacagagccagattccatctcaaaaaaaaaaaaaaaaaaaagaagaagaagaagaagaaaaaatacacaattttaggctgcttccttgacagatttggcctctgagagtaggacccagggatgagtactttaatttttttttaatatgcactccgaagtgattactatatgatcagtctgtaattgtccacatgtggcattgaggaagcagagttagtttacatagggcctatgatatgtgttcagagatcctttccattgatcatgtcatttgaatcttaatcttatagggcaagtaaaagtaatatcatttctcttttacagatgagggattaaagttcagtgaaattcagatacttacctttagctcactgagagtagagtcaggtctcctagtccacatttcattttgctctaccattgtgaatgacaagccttgcctctccttgaagactttcttaaatgggcagttaaacgcctcctgtgataccctagatcagttcaaaccctctggctacctatggtgacaaatctgctttttaaaaatatatatattttttaatgaatgagaccaatatgtttacaaaatacaataaaagccaaaagctagaaaaataaaatccaaaggcgtataaaatacaacctttcatttttttatttgtgtaaatagacttaaaataccatttcaaaaaataagtaagtgtaacatagaacgattgctcataaacatttttaaatgtttgtactcaggttttatactcttctcatctcaagctggtaacaaatagtttgctaatcaacactggcctgattagcagtcagaccagtggccagaccagtgctgattagcaaactatttgttaccagtctgagatgagactggtaacactttcagcagctgtccttcgcttcattattggggggaattcagcccttttttaggaaacctcttttcccatgacttccagccaacaggatctggttctattttctggagcaattagtcgcaagctaactgtcttacattataacacccctgccacttgaggacagttgtctgccggagatccaaccaaaccttcccagtttcttctattgactttcctaaaatggaattcttttgtactccttatcctgggccttctcatctaaacagtcatttatattcccctaaaccagcatccaggagtggaacacagaactctaaatatgaaagtgcatattctttgcaagacttctcacctcctcctccttctaattttcacaatttataggccattcttggctttgggtctataaggacaaatttcactatgttctttatcccttgtagggataaagtctacaatctggcagttacctaggagctaaaacatccgagtagcagagttccataagccattgagttgacagaaaattgcaacaaggaaggagtagccagtggaatacggcaatggcctgagagtctaagttgaggggcaatcttaaagtggctgacaacattcccttcatttcttgttctagtggaaagcttagcacttagcttcctttgtagatcaactggtggttgtttttcttctcacactgtcagtgccggctactctgaagatggggtaggtgtcctactcactccttagtgcgatctctgaatcatctcccaaattcctctctaaacactgccccctacaacttagaatcccaggccattgccatattccacctgctactccccccttgttgcaattatctgtcaactcaatggcttgtggactctgttacttggacgttttagctcctagatatctgtcagactctatttctaatgtcttggtggctcagtttcttacttctcttggcatactcttgccctgcaccctacttcacacacactgggtcttcatacctgagacactgccattgccaataactgtaccccctccattctctcagtgtcaaacatctcacactagcactgccacttccacaccttccttctcactccctctgatacatcacctgcgtagttcttaaatcccactgagaactccaaataactgatgctatcacctcttcttagtccctcaaaaccatacagaatccttatccatcttaaattctgtggccagccattataatcacatttttgccaacaaacacaagtacttgtgaaactaagccatagtctttgctaaatccaactttctgtctgccctatacttggtcacctagagctgaaagtggctgaaaaaaaaacatacaaccatgattgtttgtctcacattcacttcctatcatcaacctcaagtggctcttaccgctatatggtacttaaattttccccgatctatttatttattctcaaatctcctaggaaactatttcataccttttaatctctgctctactcctccacacctccctcctcatcctcaatctcagatgatggctctgctttctatttcataaagaatatggaaacatgcataagagtattcctgcagtttcccactgccacttgtccctgcttagttccatccatgccctatatttggtttctctcctattaggatctcagcattgcccatactcctagctaagggcagtccctccatttgtccactagatttcatcccttcctcactttctaaagatatcagtctagaaattctgtcactctcatcatttttttttttaaactggaattttcccaacaacatgtaagcacttttccattcctaacactatctagccattaccttatttcttaccttccctgtatagcttatctccttgaaagagttgctagtgcaggcttctatttgcctctttcattctctcttgagcccactctgatcaattttgtccccatgacaccactaaaactgcttcaaccaaggccatgaatgatttccatatttacagatctcattgtaaatttattctgatttcttgttttacttactctttcagcagtagatgaccagcttctctcttacttgaaatgtcttctccatttggctttctgagtaccatagagattatctaataggtatttaaaataaatctgttaaaaactgagttattattatttgactgaaaacattctcatttgcaatcttcttcatctctagcaaatgctcaggctaaaactcttggtattactcttgactgccctgaaaaacttccatcagataaacctcttccatcagatcaaccatatctgatgaataaggaaattctgttggtgtccattcaaagtatatccaggatttgaggacatcacatcttcactgttagcattttggttcaagccatcatcatctcttacctgggtgattgacaatgtcttccaaccagtctccctggacccctttcatacagtggctactcttgctgatttggttaaatttccagtcagatcacgtcattcctctgctgaagctgatgtctcccttctttactcagaatgagatccaatgctccaatcgtgactcacaaggccccagacaatccatctttgatagcctctctgactgcatcatcttctgttcccagtcctgtttttgctccagtcacactgggctcctcacttccaggcattgccgactcaaggcctttgcctcagatgttccttctccctagaactttcattctgagatcagcatggcttgctcacgtccatccttcatatcttttctcaaatagcctctctcaatgaggacttccttactcaacttatctaaaattgtaacccttctattcccaacatatattcctatttttgctttccttttcttcttaccactttttcctatagaatttttttttcattccttatttgtcctttctactagttttgggttttatgaaggcaggatttggtgtgtgttttgtttactactatattcctagcacctaggacgctgcctagcacacggtaggaactcaataaacacttatcgtgtgaatcaatggttaagtgaatgcaggggatgttggacttttacttcttaagatacgaacattttattccataaatacaaactaaatgtggatcagcttctcttatatttaagcaatcacatcctactcttgatatataccacgcttatgatcaactacaattcccagctctttttcatgtgaacttctgccaagccaggagttccctattatgtattcatagaattatttttaaattcccacacatggccctttataaacttcatcttgttaaactcaacagcccaagtctgccaagagataattctggatcttgattttgctatatcttacattaacattatcttctagctttgacaaactgttttgtttgactttatttttgtttattataatgataatcagataggacaaataaaaaaatttgtgggccatcagaagagaagttgggacagactgcatctttcaaaaacagctgcaccaatgaatgctcttttatactgtggtggtactatcccttattgcgatattgggtctcatttcccttccctttaaactgaagactcttaaaactgcctcaatcaataaagtagggtagaagcaactctttgtgacttctgaaagttaaattagcggtgacattacttcttcctgtttttttctttcttgggacatgcaccttggaccctgagctgaaatgaaagaagtctggttacactaaggccaccatgctggagaaatcacctggacagaccacatagagatagaaattaaagcctgaggtgcctcagatgttccagcccctagttgtttacatttctgaagccctggcaccagacatgtaagtgatgaaggcatcaagatgactctaacactgcaacttcatgagggaccctgagccagaaccacctcaccgagttgatcctgaattcttgacccacagaaaccatgagagataaaagaacaatgattgtagttttaagccactcattttttagatgatctgctacagagcaatgggtgactatcacctattgtagtagaatgagcttcctggtgatcaggaagttaaaaagaatgggtaagactttacacactgtcttttatagattctcatgcccacaatatctgatccaatgtttcatagtttgatacatctgattatcagctcctcctcctgtgggagaagtaagtaacagggtgcaggtacacagttgaaatactgttgtggagagtggtggactctactgaattaggtcttgggggctatatatcagaaacactcaaggtgtgggagaacactaatattctctgaggggaaacacaatcaattttctttaagcatatgctgagtagcaagtttccaaaacacagactctttggggtaaacaagaacaatggtttcagtgaattgagatagaatgaagatgactagaaagcaagctttgggagattggtacaagaatggtgataggctttgattcacgattttgctttgaccggccccatttgtcatttatttgaagaaaatttgaagaaacaattgttttgcatggtgttgaaatctctgttgatacaagctccttttctgcattcaccaagttctctgtgctcaccacctttgggtttgatttgccaatgggaggacacttttaagctctaaggcagaatgttacctttccatatatttgctccaaatttacattctcacatttgagtgaaaaataaaaagaaaaaactctaattatttcatttactccagtaatgtctaatatattgcagtctttggagtgccaacattttatatgggatttcaattgattcttctcaccttgtcttttgattttaggcaacctgggttcatttaaaggcacaaaccctatctcaagtttttcatttaagatactggctttaactctgttccttcgctcctatcattgtcataataccattgtttttatattaatagctttaccaacttgaactgtagatagatattctaaggttttgctcttcaagaacagatataataatttattaatatcttctttccccaacacctctctttatgatttcctaaactgattttaatcataatgtctgaaattttcccttttggacatttatttcaggagtatacagaacaaagaaaattagccacaattgggtttaaatgaacttaatcagatgattttttaatgagcaatgaggggttgtctccctcttatttctctttttcccatagagtcggaccatgcaaaaaatgcacacagaatctgtagccaaaagagaagcaaatcacaaggttgttaatttctggaacttaagttttggataatttaatcccatatttaagtaatatctgagctgcttttagttctggggccaatgggtgttgtcacccatctcttactcagaatctaaatgatataatttggcatttttacttctttctgcaatgaagtgattctgatacctcctctccagtaggtcacgtggacaaggatggtccttctctctggaaagcaggcctagggcccctgcagatatgctcacagcacggtgtcaagtagaatgagcttcctggtgatcaggaagtaaaagagaatgggtgagactttacacactgccttttataaattctcatgcccacaatatctgatcaaatgtttcatactttgatacatctgattgtcaactccttctgtggaagaaataagtaacagagcggaaagagaccagaaagtcctttgtgggcattccttttgagtgggaagaaggggaagaaattaccttggggtgggccagtaaggctaaacgagaactggagtctgtcatccttcacttgcaccatcttcctagactctatttcctcttatccaattatgtttaacagctgggtcaatagttgaattcgattgtggctgatatttcaggacaagtatatcaagcctagtggtttaaaataataaccattcattgtctcttgtgaatctcaaggtcagtgtggtggttctggtgatcttggctgggatcattcatgcatctgcagtcaactgctgggtcagctagagcccagctggtcaggatgacctcaaatgggatgacgctactttcttccctatatgtctcagctgtctccatcagatagcatgggcatgtcttcatggttactgccagggcaagaaagtctctgcatgcatcccatttcttcttgtttcattggccaaagcaagtcacacaactaagcccagattcaaactgggaagagaatacacagttatagaacagggagaattcagggatcctattagttgggactacgaatgcaatcaagagaagcaatgtatcaggagagtcatggtattaacttcttgattctgatgtcacccccaaagaagtttctgtaataatgaaaatgttctgtacctatgttgttcaatatggtagccactagctacctgtgacaacttaaatttaactttaatttaaataaaagtgagaaaatgagtttcttagtcacaatagctgcattttaagccttaatagctagcagtatactaataactttttctaatattttaccttaaatcagtgaggtgaaaaattattcacctacaagtctctatagtaggttaaaatgggacattaatttgctatattttaggcatttttgtgtcctattgggaagtgatttaaattgattaggtcatgctcagccagtttattcttctggggaacctttagcagcttactgtaatggagaaggtgatatatctgctctccacagacctgctaaaacattacagtgaagccaagtttcagacattgctctgtctcacctgtagacatttattggcaaacaggcttgagtctgtttgagacataccctgctctgcaggatcaatcaagacactgtctctacttttaggcatgtttttcagcttcactgaattgtaattctatatattcaaggcatacaatgtgatgttttgatatacatatatattttgaaattattgtaccaatcaaactaaattaacatagccatcacctcacataattaccttttggtatgaatatgtgctgagaatgcttaagatctactctcttagcaaatatcaagtatattatatattaactatagtcactgtgctttatattatgtctccaggacttacgtatcatgcaactgaccaatgtctgtctattttccccatccctagaccctggtaaccatctttttagtctttgtttctgtgagttcaacttctttagattactcatgtaagtgaggacatgctatgcttgcctttttgtccctggcttattttacttagcaaaatgtctttcaggtttcaggttcatctatgttgttacaaacaatagaatttccttttagttttttgagagagcgacaaaggtctcactatattgcccaggctggtctggaatcaagctatcctcctactttatcctcacaagtagctgagactacaggcatggcactgtatctggctttttattttatgacaaaatttatgttttccaaaagtctgttatatttctattttgtttaaagtttttctagcaatttttagttttaaaacataaatgctagaacatgcagcaaatgtaatttttgttaataagaaattgtaatcttttgtggatggtaatgcatgatcaatttttgtaaagatgttaagaaaaattaggaaaaagatatattttttgtttacagattatatatttccctacaaattccagcttttattttatattatttaaactatgcatttatttatctttgtgttcctcatctatcaaaggctgaaaactaatgaaggcttcttcattggttgcaattttgtccatttcatctttaaagtttttaatttatgcatttggcaagctgtgattttatgcatgccattttatgactgctaaatttacattgtgagtgtatattttaacaataaaacatgacattttaatttgaatcatccttcactcggaaagaatgtaaacttttggtaatgtactattaatattattcagaaagggtacaggattgatataatttcttaagacttgcatacttaagaccttatttttcttctgtccaaagaatgccgatttgactgtgtaggaaattactggattacaatccttttttgtttttttcttgactctgcttcattatctcctgacatttctttcctttttttttttttttgaagtaatttgtgttttcttaccatgtcactgttggattttgttttctgtgttttgctaattcaaaaatgcatccagtagttgtcaagttgtaatgttttttcttattgtttttgtttggttgtctgttggaatgtgtgagcttttttaaccagcatacttgagtactttcttgaactcttttctctttttcaaaacttagatcattattgtctttggttctgattttccttgttttgtctcatcaggtatgcctataagtcttaagctaaatttttatcccctaactctttgtatttaattttataccatattgtttttgtctctttatctttttcctttcagttctgagaaaaatatctcaattctgaccttcacagtctctgccccatcatgaactagattttcagcaatgctgcatctgttttatcttagctctagtgaggactttaattggattttacaacgtcagtgtccttaaaacccttccctatctcctcagtcaccttcatctcagctcactgttttgtaccttaccctgaggttatataatcatcttcgttattttttcttatacctttctgtttctattttatatagatgaagacgtgtcttctgtattaataggactcagactttcaatcaacggtgtttgctgaacatctattttgtgctcagggacacctttattaggcacagacattatacaaaataatcacccaaacaattgtatactgaaaaaatcatagggtgccctgagaggatgtaacaggaggcccactttaatctggggggtgaggaagggactccttgagcagctaccatttgaactaaaacctgaataaagagcagagggagccagttacggagaggtgggggagaggctggatgctcagcaaagcatgcagcatggcccaggaagccaaaaatgctgcctccttccatgtactcattgccaagatttcatgaaatcatctttcccttaatctgtacagttttttaaattttattattattttttgttttttaaggggatcctgtattgctgttttcttcttaggttgagaggagtttttctctggaccctaatcagggcacaggccctgtggataagccagagctcatctgccaactttggtgacagtggaaatcctctctcatgtcaaagctgaactgagttagtgccaatgtgtgtagtttccagtgcatcatgctatcgaagcgtgttcatctagtatgacattgctggactaggcgatgtcttctgctatgcaaattgcctgatgtgcctctcttactaaagaacacccaggcacggaagggctgccagctttcctcgtagggaggggaagtttagataccaaattctgagtcagtgtcaaattggtggaaggcatttttgtcttcatgtttcccagccaatagagctgctttgtctcatgaacaaggacttcatagagagaggacattccttccaaattctgaaactagattactcagcactccttgtttttgggtgatgtgatcagcttgttttattttagttgttttatcgtctgttcatttacatatgttttagtggtatgtaagaagttgtaacaagatgctattttaaactagaagtcttataactgagaacatgtggtatttggctttctgttcctacattagtttgctaagactaatcgcctccagctccactcatgtccctgcaaagtacatgatatcattctttttttatggctgcaaagtatgttgtatatgtaccacattttctttatccagtctatcactgatggacatttaggttgactccatgtctttgctcttgtgaacagtgctgcaatgaacatagacatgcacgtgtctttataatagaacaattcgtacccctttgggtatacaaccaaagtaatgggattgctggtcagctaaatgataagaccacatggacacatagaggggaacaacacaaactggaacctatcagagggcggaaggtgggaggagagagaagatcagaaaaaatgactattgggtactaggtttaatacctgtgtgatgaaataatctgtacaacaaacccccatgacacacatttacctatgtaacaaacctgcacatgtacccatgaacttaaaataaaagttaaacaagtaaaatagaagtcttttatgtgtttttgctctgtgaaagttcctggaactagttgattttaaaaccagtcttttggcaagtgaaaatttcttttaacagcagaaaggaaaagcatgcatgaaggtcaggtcagtattctttattaaccagttcttttattgtctagtatgaacttgcggggatttgggtaatgtagaaagatggcgaagagagagcattgatctgtgtatgaggattcccagctctgacattaaatgtgacctccctggagtcacgttccctctttgccaatggaagaactcagacaagtccatctttttcaagttgttctgtaatatcctaagtccttgccactccaagtgtactcctgcaccagcggcatcatatcacttgagagctagtgagaaatccagatttcaggccccactttagagctattgaatctgaacccgagtttttaacaagactcagtgattcctatacttgttaaggtttgaggagcgctgattctgcatgagtctatgatgctagagggcccctcatgggaaagccaggggatgtggcagagggaaaaagcagggtgttggaagaggatctttcttcactgtactctctccaaactgcttcaaacagggaaacctcttttttgcctttcttttctttttaatagattagcagtgctcatatatttcctttcgggaaagacaggtccttctgcaaataagaaaattctttggctagggtatcatcaacattatttcagcccaaaagcttcacaaatacactttcaaaggcaagaggaaggaaggcaaattgattatagcttcagaggaaaataattaatacaatactaagcatacagacttgttttcttggagctcgtgtgggattagactgttgcagggctgttggaaattcaggaaaggttaccttgatttctgcaggagggaagaaactggtcctatactaccaccaaggcccaggagaaaccccatacctggatgctcacagagctcagagtaggggcaagacagctctcccaatatttctagcctccgagcaaattttaaggaatgtcagatttttggcataaagcatagaatggtcaaatggcatattatttctgcaatggcaagatttatttatattcatttgacaagatgcattattaatttctgtttggccaaaaaatgttcatatgtccaccttctataatcttccctttctcccagctatcaccacaataattctgcacaattacctccaacataatgtcttaaagcatgaagtattttgttttgttctgtttttctcgcaaatctgcaggttgactgagagactggctggcctgggccaggcttggctgatcagggctgggcttgcatctgagtctgaaatgtgctggcagaatgactggagctggctggtttgccataggctccactgagataactcaggtctcctccccgaatcatccacatctctctactatgctaacctgtagctgttatcacaagaaattgcagaaaagcaagagagaaagcagaaatgcaaagatgcaaagatgctttttaagcctttactttcctcccatttgctaacttcccattgacttgaagaagtcccatgggcacctccagggtagaaagcctcagggtaaagggtgtgaatacatggagggcattcattaaacaaacttgattggatttaaatcaattaaattgaatatcaagctgacacatatgatcttaaaacaggaattggcaggaaaccagcttaagaaatgctaaaaagttgagtgacttaggaataaagtctaagttcatgccctttgcagggacatggatgaagctggaaaccatcattctcagcaaactaacacaggaacagaaaaccaaacgccatgtgttctcagtcataagtgagagttgaacaatgagaccacatggacacagggacgggaacatcacacaccagggcctatcgggggtggggggtaaggggagagatagcatgaggagaaatatctaatgtagatgatgggttgatgggtgcagcaaatcaccatggcagttgtatacctatgtaacaaacctgcacattctgcacatgtatcccagaacttaaagtatgatcataaataaataaattctcagaacatggctacctcagacagatggggtttgttgcattacaataagaaataggcacaggtacaaagtgaagagattgacgacttttcaatcagccagttagattaaaataacatgaggaaaggcctatggcaagtattctattttttcctgtttctggtttgggagataccatgccctgtcttgcgtattaactctctaaacaaaggcatggtgtactgctgcccaattgatttatgactaattcaactttacacggtactaatgtgatatttacatgtgaccaatcatctctgccaagtacttcttccatggtcgacttaggccctcctgtcaggcactgcctttaaagtgcttttatgtaagcatttaataaagccatgtggctggcaattactgcaagaaatgtttatctcctgaatcttagatagtcagaaataagctatgtgactgacatactcctttatctcagaacaagctttgctggagatgtccaaacctgggaggaaaactcagactgaaatctgtgaactatcctaagtatatcaggaataacccagactaatttgagtcttgttttccctcctactggggacaggagcatgtggggtgggaaggttaatgtagtgcagccttatcgcctttgggcaattctgccaacttggaatagttttgtgtctcttctctgaaaaggaaatgtgctttgccatagtgataaggaggatagtaaagaggtcaatccagggagatgaggatgcctaccaatgctccctgttctacccgggattattatgaatctaggaagtgagaggctacagttaattttagttctgagtaattcagtctctaagggctttctttgagaaatacaaataactcaacagaaccttgacaaaaaggccacattctatgcacccagggcgagggcccacatttgatttttacacaggagtcaactcagacctaattcaacaaagacaaaaataagatttctatacttttcaagaatctgttatgctcatcttccatgcctttgctaaatagaataattttgctctatggctcaggaaaaaaagagcaggaattggtaataacttccttctaatcattatatcattttttttatggcaaaggagaaattttcaaggccttgaatactaataaggtgccatactgctgacaggaaccatgtatagtgagaggagttcatacctaacttctgggcaaactttcctaaaaaagccacactcttccatatgcatgagaaaagaggaggaggaaactcttagatacaacctgaatattggtccctgtctcctgctttcataactcttctctctcctttcatggacctcttttctattttctctcagtagctcagaataccatctaccttcctatttaaaacctatcttgctcacctcttatcttccaactctatacttaagtcaagaagatttttaggatattctggaggtgcaaaccttaggcctccaaaagagcaaaataatctaaataagtgaatgagtggatgcatgggtgaatcaataaatggatgaataaatgaataaataaaatatgttccactctctcttcagccaatcccaacaaaacagaaataatacaataaactttcattcaccttcagtacgacggagttcccaggtcaattaaggttgagacttctcccagaattatgggaaccacaatcatgtcattaaataggtgcattttcagattattggcatctcaggaaagctcagaactcccttttctccatagttcctctgcccccaccacttatactgccagactgtggggagagaagtcattccagagcaatgctatccaatagaaaattactgtgagctacacatataattttacatcttctggtagtcatttttaaagaaaagtagacagtgttttatgtgttgagtcccagcaaaaagttatgttggagttccaatccctgatacctcagaacgtgatcttatttggaaatggggtctttacagaagttaggaaattaaactgaggacattagtgtgggccttaatccaatatgactgatgttcttataaaaagggaaaatttggacacagaaaccaaaatgcatagagggcaggtaaggggaatagacacagagagaagacagccttctgcaagccaaggagagaagcctggacagatgtttccctcacagccctccaaaggaacccaccctgttgacacctcgattttagacttctagcctccagaatagtcagacaataaataatcagttgtttaagccgtctagtttctggtacttggttaatggtaactctaacaaactcacagcacaaaacctaacacagtgaaaagatattgtaataatatgttttatttaacctatttgataatatttaatatatcaaaattattattattccacatgaaatcaacataaaaatagtttacattcttccaaatccagtgtgggtttgacttttacagcacatctcaatgtggactcaccgcatctcaagtgctcagtaaccatgtgcggcttgttccccatcggacagcacaagtctaagatgagctgagtcatgcgggaagggccctgctccccacttccccaagaagaataagtgcacatccactgccccagggaactgtacagttgggagcatctggggactttaacttcatgtcagaggatactacattttttaaaaaagcattccatgtttttccattcatatggcttctgtttttaaaggttcatgtatttcgaaacctgacaatagggtgcatttcctgcttgggcaaatggaccgattcagtgttattactttcattatacaaatgcaaactttacaagcaatttaccatagaaactgagaaaaaaacccaccttcttccaactaaaaatataacagtctctatataaatatgcacaaccatatgatgaacaatttctggggcagagagctccattttatttcccttaaagaagtcagtgtggtggatcttgagtgctatgtgcaggcacggattcctcatccacatgcccaccacaggcgggcgggcagtgccttcatccttgggttggcccttcaactctgactcttctatctgttgcatggcaccagaagaaaagagcagagggagaagacatttctcatattggtcaactttctttttatagcttaaaaaataaacattcacaaataaatatggtttatcttgccaaataccttttccaagaaaaataagcactgcctggaaaagctggcacaaactactaataaatgggagagttatccaggtagattctagtaggggagagaaaacggagtcctgtaaaattatgaggaaaatgggagcatgaaaagtatgagactgtgttgagaaaggcactgaggctggcattagtctgggcccgggagggccctcctctatttgtctgcttttcatctttttccttatgactctgtcctctctttggtgtgacatcacccattaccacggcttcacttgccatatgtatttcactgatggtctctaagccactcaccggcccggaccaaactctgaccctccagaaccttctttttgcctactgtccatcctcattcccggtttctccagcagaccaaactccaggtagcaacagcctcagcttttcctcctgagcttctcctcttcttggctttcctcctggcataatgcacaccatttatcacctgaacgctaaggatcacacgtgactcctttctcctcctcattctccacctccagtcagcccctgagcctcatgcctgttgctgcttaaaaaccacttgaatctctgcttctcttcgatcactggcactgcactgcccacctcaggccaagccactgtcatttcccacctggaccatgaggcagcttcctcatgggaagctactttccatgattctgttccttccagtttgtcctccaagctttagatggagggatttccaaaacaggcagatgtgattaagtgcttgctggttttcatgcttctgtggttcctcatttccctgagattaaagtctccatgttcctgcatgttccagcagctgccccatcactttcctctctctgttgggttctacagtgaatctgaaggtgaggtgccaattgagcagcctgactctcctgggaagttgttagaaaggcaaatgccagggtcctccatgacttagttaatctgaacctttggggcagtggtcaacatctgtgttttttaacaaggcctccaggggattctggtacatggtcaagtttaagaactctggccaacatggtgaaaccccatttctacaaaaatacaaaacaaaacaaaacacacaaacaaacaaaaattagcctggcatgacggcgggtgcctgtaatcccagctactcaggaggctgagcctggaaaatcacttgaacccaggaggcggaggttgtggcgagctgagattgcgccattgcactccagcccaggcaacaagagtgaaactcagtctcaaacaaacaaacaaacaaacaaaaaaacaacaaacaaaaaaaactaccagtgcccatgctcagccatgtcaagtaaaaaacacatcaggactcaggaagggagggacttcactggaaaggagcattataagggtacagggaaagactattagaataagaggaatgctctgaccgcaagatctgcaagcttctcaagagttaggcaaaaatcatttttcttttatggagggtgagcaaggttagaaagagcctagtgtgactcagaagtaggatggaagagtgtgggatgatgtgacagtggtttcagaagtggcctcttctcaggagctgctgttgaagaaggtctgcatgctggcttgggctgaagaaggaccaaagtacagggacctggggaaaggagagaaaatcttcaggtttgattaacagacattttgttacaactggtgggtgaggacaaacagttcagctaatcatttataaggcaaagcataagaatttggagggcctgtgtctatgcctagctttgtcacgggtcatccttgagtcttctctatgtcctatggagaagggaagttccttgtagcagactgttctgaacacaaaagactaagggattactgaaccttcgctgttgcccaggagcagaggattcaggtaaaatgtagcagtgtcggtcacttgcacctgctgtgtcccctctcacctgtggccctttacacttgctctcccctctgcctgaagcactcctgcccagttctccacttctcctcttcattacatgctcttccagacagttcaggtcctggtgtcatttagagtctgctctcccatgccagactctatgtatgtcaccttcactctgcatcttcagctctgacccagcacctgacaactagatggagtccataaatactggggaaatgaaggaaagtaaaaagttcttggaagttttgtcaatttaagaaacgctccatgattatcaacaataatccctcaataacttttttcttctctgcagttagaaggcagcctgaaattttgcattttccccctgagagctcctccacactgctcctgaaatggctgtcattctacttattcactggggttctctttttccaggctcaactacctggtggggttttttttgttgccattgttgtttttttttgtctttttaaacaacttctctcgttttccagggcaagttagaggtgttaagttccctaatgtgctactaggctgcaaatgaagaatttaacagcccatgggaggaccaattagaatcaattatgacataattgaactgccttgtattccttgtcggtatagaacttctttctggaaggaagattgtgcctttcttcacactatgatggagtagctgcatgagttcacaggcaatggttctgacctaatcaattctagaatagagtttcgtggagctagcatgccttgtgatatcagggccagagaagctcagctcaaggaagccctgactttctcatttctgccctccaccccccagttttttttcctttcttaagaaagctgctaaattcttacaaagtatataaaataccttacatgggcctctggaaagtcaggacactccacctattgaagaagtgagaaggaaagattgagtctgaggtcaccatccatttccctccattttcttcattattgggcgtgagagatcagacaaccatgagaagatcaactctgtccacttttcccagtaaccgtcctctggaatctggcctttgggccattggtgatgggagccagtagttgcatgatttcctctttcttgctacacccagcctcatcagtcctgggttgtagcttatatggcttccaaaggcttcagtccatgattaagtaatcggtctccccagcagcagccgtctctataacgcaggctcttttcaacttcctttcttgactcttcctgtttttcattcttcctccctggaaatctataccctaataaaataaaataaggtaagccctcaatttcaccctcagctttgtaatgaacccagggaagaccaattaaacttgtgaaaatggtaaaacgagaacaggttttgacttatttgcatatttttgaatattagcaaatagttgaagagatctagtgaccagttcctgacacaggactctaaagtaatagaaggaaaactactctatggctccgaattttgtgttgtttgaatatccatgtccagtcacgtatctgttatatgccttcctagttccattcaacttccttttttatatcctggagcaatttcctccatcacttactctctatacagagcttgttttggtttggatccctcagaaacagatcctgagataaggatgtatgtgcaagtagtttattctggaagtgatccaaggagatgcttggattcagtgatccaagttagaggagtggggaggtgagggggagagaaaagcagggaataaaatatatgtcaatgtggaacccaatcctgctggggaaacttcaggagacaatgtagaacacaatttggaattatcccactagaagggcaagggagctggagtatttacacaccaactcctatcagttgtattggttgagggctgctcctcgggacagatgggattaattctctgtcacctccagcctgccctgtatgtaggcagagaggtttgggaagccagaaagagtcctagggcatctggaaatcaagccattgttctctatgacagtaaagctgataggatattggtgggatacaagaatgctatcaagtttacctcccttaagtcaagagagcaaagaggagctctatgtctagtggtctctgggagttccagctttcagtaatcatcagttctggcttcagaataaaaccacctaggaaacttttaaaaaatgctatcacccagacacctcaccagaaaactaatacaagtgaaaaataagcgtataaaagagtactcaacatcatatgctatcaaggaattgcaaattaaaacaatagactatcactacattcctattagaatggctgaagttcaaaacactgaccataacaaatgctggtgaagatgtggaataacaggaaccctcattcattgctggtgggaaagcaaaatggtacagccaccttggaagagagcctggcagtttcttacaaactaaacatagtctcaccatatgatccagcaatagtgcttcttggtatttacccgaatgatttaaaaacatatgtccacacaaaaacccctccacagaaatgtttatagcagctttatccataattgccaaatgtggaggcttcaatggaaaacgtccttccatagttgaatagatgaacaaacatacaaatgtgcatctatatgcatatatacaatgaactattcagcaataaaaggaatgagctatcaagccatagaaacgtatggaagaaatgtaagtgcatactgctaagtggaaaagaaaaactcagaaaagcctactatatgacgttctctaaagggtaaaaagctacaggcaccaaaaagatcagggatttctaggaatttggaggaaagagtggagagatgaacaggtggaacacatggggattattagggcaatgaaatggtggatgtatgacattatggatttggctaaacccatagaacagtataacacaaacagtaaatcttattgtaaactatgcactttagctaacaatgatgtatcagttttggctcacttgtaacaaatgtaccatgccaaagcaaaatgaaaataataggggcaactgtgtgaaggcggggagagagtatatgaaaagtctgtgctttctgtttaatttttctggaaatctaaaactgccctaagagataaagtctaattttatatagaacatactccataaattaaaatttccaggggtgaaaaccaaacattagtatcttttgcatgatccctgggaaaccctaatgtgcagggagagttcagttgcactggggtaagtgtacagaagagttgaatctctcctggttgtctttgtgcaaaggtctttcccttggaggcagttggtctcagtagcatgctgtttagggaacaagagaatttaaaaattagtgtagaatctgcaatttttaattctaaggagcccatacatgcaaaacaggtcacatacagttatgaatcattaatagtttaactacttattaaaatatatgcctgtaatttcattaaggtaaaaaatgtagcctttgctgttccagaatgctcctccaatcagtatcacctgggagcttgttagcaatgctctttcctgggttccctctcattctatggaatcagaaactgtaggggatgaggcccaggaatctgggtgttgtcagcctttccaagtgaaacttaagtgccaattcgtgaaagtcgctgttttgaacagaggacgaaagtgtaaagcagtggttctaaaacttggctgtacaataaaatgacctgggaagatttaaaaaaacagcaatgttaaacatatagtgatgtttaaaaaatattgacattttggttctatttccccaaattgtgatttaattggtctgcagtatgttttgggcaatgggattttcaaaaactccccaagtgagtctaatgcgtaggcaatctgagaaaaactggtgcaaagacaataatcagcaaattctgggcctgctgtcaccaacaggttgatctccaaaactcacttccttgaaaccctctcaggaaacttctcccaacccggaatatttccatcttcccctgcctccatgctctccaattcattattactaataccacatttttgcctctggttctttttctctttcatggtcttaggaaatgcaaagtgcatcatcagggaagtgttaataatgcccatttattttgtgattctgccccaaaagactttcctgcagcccagttatatagtgcatattacaagaactcaccctgtaaagagaggtgagtttaagcgctttaaagagagttactgtaatatgcactaatgctaataaaaaacatttaaatggtgctggaatattttcttttgctaacttttattttaagttcaggggtacaggtgcaggttttttacttgtgtcatgagggattttgtgtagaatatttcatcacccaggtattaagcttagtacccatcagttggttttcttgggactctccctcctcccaccttccatcctccaaaaggccccagtgtgtgttgttcccctctatgtgtccatgtgttctcattgtttacctcccacttacaagtgagaacatgtggtgtttggttttctgttcctgtgttagtttgctaaggataatgacctccagctccatccatatccctgcaaaggacatgagctcattctttttcatgactgcatagtattccatattgtatatataccacattttctttatccagactatcattggtgggcatttaggttgactccatgtctttgctattgtgaatagtgcttcagtgaacatttgcatgcatgtgtctttataatagagcaatttatattcctttgggtatatactcagtaatgggattactggatcgactggtatttctgcctccaggtctttcaggaattgccacactgtcttccacaatggttgaactaatttacactcccaccaacagtgtataagtgttcatttttcttcacaacctcgccagcatctgttatttgactttttattaatagccattctgcctggtgtgagatggtatctcattgtggttttgatttgcatttctctaatgattagtgatgctgagctttcttttccatataattgttggccacatgtatgtcctcttttgtaaagtgtctgtttatgtcctttgcctacttttttatggagttgtttggttttttcttgtaaatttaagttccttatacatgctggatattagacctttgttagatgcatagattacaaaaattttctcccattttgtaggttgtcagtttactctgttgatagttgttttcactgtgcagaagctctttagtttgattagatcccatttgtcaattcttgcttttgttgcaattgcttttggcatcttcatcatgaaatctttgcccgtgcctatttcctgaatggttttgcctaggctgtcatccagggtttttatagttttggattttacacttaaatctttaatccattttgagttatttttttgtatatggtgtaaggaagaggtccagtttcattcagtcttctgcatatggctagccagttatcctagcaccatttattgaataggaaattctttcctcgttgcttgtttttgtcaggtttgttggatatcagatagttgtaggtgtgcaatcttattattgggttctctgttctgttccatttggtctttgtgtctttcttgtacagtaccacgatgttttggttacagtagccctgtagtatacattgaagtcaggtagcatgatgcctccagctttattctttttgtttaggatggccttggctatttgggctcctatttggttccctataaattttaaaacagtttttttctaatcctatgaagaatgtcagtggtagtttaatgggaatagcattgaatctttatattgctttgggcagtagggccattttaacaatgtttattcttcctatcaatgagcatggaatgtttttccatttgtttgtgtcatctctgatttttttgagcagtggtttgtagttctctttggagaaatctttaacctccctagttagctgtattcataggtgctttatttttttgtggcaattgtgaatgggaattcattcctgatttggctctctgcttgactgttgttggtgtataggaatgctagtgattatggcacattgattttgtatcctgagactttgctgaagttgtttatcagcttagaaagcttttgagctgagatgatggggttatgtcatctagatataggatcatgtcatctgcaaacagggatagtttgactttctctcttcctatttgaatgccacttatttatttatcttgcctgattgccctggccagaacttccaatactatgttaaataggagtggtgagagagggcatccctttcttgtgcctattttcaagaggaatgcttccagcttgtgcccattccgtataacagcactgtattttctacaagctggagatgttcttataacatttctcttctctttttttctccttccaaaaattgataagaatagggctttggggttttgtgttcaaggagaaaaactttactagggattccaaagaggaagatgatcagggaagaataataggacccagaatctcatagcaggctgtcatggaaataagagttgttttggagagggggcatgatgggaatggatctctgagtcagataaaaaaaagaagttttgagggttttctgtgtctggcagagacccaggctggcttgcatacggaagacgaagacccaggctggctcgcatatggaagacgaggctggtttgcataccaaagacgaaggaattgaccctggtggctaaaggtggctgaaaacatgcattgtggccttgagagcattggaggggaattctgtcagcaggtccgctgtcagtggaatagaccatgtgtggcgtgcctctgagtatgttagttccctattgcttgtaacaaattgccataaatttagcagcataaaacaacacacagttaatatctcatggtggattccgtgggtagggagtacattatggctcagttgagtgctctacccagggtcttactggctgcaatcaagatgtcagctaacaataatgttttagaattggctcttttgtagcaaatgtaccacagccaaagcaagatgttataataggggcaacccttctttccaaacaactcatttttccaagacagcctcctaagggcttctattaattattcttccctgatcatcttcgtctttggaactcctagtaagtttttttttttccttgaacaccaaacctgaaagccctatttttacgaaattttggaaggaggagggaaaaagagaagagaaatgttctaaggacagctccagcttttaggaaatacactgttgtgttccattctggagcttggggtcttcttccaagatcacatggtgtttggcaaaatgcagtttctcctggttttcttgctgctgtcaggtgggtccactcttatctcctatgtgccacctgcagttctttaccacatgatccttttaaaatgtgacaactgacttcttcaaggcagcggaacaatcttttgcctcagagatggcttagtccccctttatatgggctttcacctcatcattataggcccaccctggaatatctttctttactcaaaatcagctcgcttgggatttgaattacctctgccaaaatcactttacctttgcaatattgtaatggctagaggcaagttgcagatctcagccacacttaagaggaggggattacatgaatgcggggataccaggaagtggtagtcattgggagttagcctagggtctgtccctcacaccgaggtaatgcaaggtacaggccagaaatgacattagaattaggtcacaggggagcactggtaaagtcaatgacgtagtgggccaaaggcctggcccttttcctatttcatagcttctaaaagacccgcaattcttgcatgaggccatcaacagagacagagggcctcagtaatgatgagcattaacaaaaatcattccaaacttggatgtaagatcaaaggtgaaaggctggattattcagtgtcatacaggaataaagagtccacccagggattaggcaatacatgttgtttaactaattgttccctatggattagaagtcccagacgtagtgaagctactttgtatcttgcaaatttttgttcagtgtacagatgcaaattatttctacagtggagcagataacttcaaagggtatgatttatcaccctggtaggcattaacacattttgtatctaacccagcaatatcctaacctgcctttattacctcacctgtaatagagacttgaattacaagtcttgaattgcaaaacagcaacaagaaaaccatgagaaactgaattttgccaaataccatgtgatcttggaagaaaactccacgatccagaacagaacacagcccagctgacacctggattggagcctgcgaggccctcagcagagcacccaactgagccataatggactccctgacccacaggaaccattacaggtggtttctttatgaactcactataacaggtgagttaataaaggcaggttaggataagattgctgggctggatttaacatcatactgtttctctcagtaattagtaagttgaataaatctttgacccatgttcattttatatttacctgataattattttatcctcttgaaaattatattttaacaatgggaaggaattctccatcaaccaggcaggagaatacagtttatttgattttgaaaaataaagaaaaatgatttctttttaacccaatggggtaggggtacaattcatcctctgcaaaatcctctcaaattctaagaggaaataatgttcttttgaaggaaggaaggaaataaatcctccaatagccacataactttttccctgtagacttataaaagcctcatctgtggtttgcaggcttaagacaataatacttaaccaccagatctggtagtgattgtagccctggcaaaacattgagacccaagtcaaagattcattgtgagggtaaagcatgcaggttagagcctctgtcagaaatgctctgctgaaaatatctcagactgagcactcgctgatatgacagatttctagctaaatcttttcatttttttcaagcatggtttgacctggttcttggcatatatagtgtaatccaattaaataaaaatttaatctgttaaatttatttataaatatatatatatccttcattatgtatagtttattttattcattttatatacatgtatacacacatgtgtgtatgcatgtgcatatacatgtgttatggtaattttgacttcatgctattttcatctcttacatttactttacaacataatgcttggataagacatgccaccactgcatatggacccaagcctggcgttggatgccacttcacaaatgcttggtctgtgttgcataacatattttcacagaagttcaggaaagaactgagtcttaggctgagccctacttggacttctgagtagaccttgtggtgccacccagagtccgtttatagggctgatacatgcattgctcagctaccatggatgttgcttcttaaaggcacatagctgtcctccgtttgtcttcctgagagaatcatcttaatcaacagaagctgtctttcccagaaatacttggagattattccctttaaccctcaaagttggggcagcctggacccaatgattgactgatatcaaggtgcagagctggccccatttgattcatagggtggtcactcagtgacactctggagctttctgtgggccaggctgagactggattttagctgacatcacatccttacttggctccttcactgtcctatcccacatcactcattctccttctcctcagagtgccccacccaatggtcactttgcacaagaatccccatctcaggctctgcatttggggagtgcagcataaaactttctgagacaaaaaccttctgagctgattttcctactgcaagtaatcccagaatgttgacagtgtgtcaaaggaagtacagttcctttcctagtagtgatacttcctgtatttaagagggtaatagtaccttccatataactacatttctacctctttaatccctgacactatcttatccatagacatttttggaaactaattctattacatcagcgaagtgggaaattctttggacatgaaagcagtggactttgtttctcagccaaactctacggcagacttgccatgtggatgccgcaggaccctacaatggcggctcattttcaccattgatgaaatgggaattgtccagctgtccagaccactttgcagattactgggagtggctaatatgaatggatggtgaatataaaagtattttgagaacttccaagtatgttaggataaagtacttttgtttgtaagagaatatagtataattgcaactgacttgagggaaaaaaagtgactataaaagcttgtctgtctaagaagttcacagattgaaactgagatcagatttaggagctgtcatcaatggaatttttctttacttttatctttgggtaattcttacttctttttagttttattctcaggcacagggaagtaaatggctttagttagcacatctccatccccccaccaccactactcaggcataagaatatccttagaacttatgactcaggggaaaagagaacaattttctgagtaactctggcaaaaatcatgggaaaaactcccatgggacaggattgtatcacatgcctatccctgaaccaatcactgtggccagggatggtaatatacgaattggctcaaacttggcttactgacctattctagggtcatgggatctaaatccactatgccatatggaataagcaggaaggctgtggagtaagaagtgatgattttcccccccaaaatagatactagatcaataaccatatgtccagtgttgtacacattgcaaggtataataattattaaacagataatatcaaatgttggttgctctcaagaccatagataactaattagtccttgtggtatattactctattgtgataattcatatgataggtaaagttgttagtatcaccaaattgtcctagactcttaagcattgttaaatatttgcatctgtattattctgaagtttttctgttttcctcttgtccattattgaaattttaatatgctttaagtgtcccttccacccattctaccatggaccaagattctagacatttatgttgagatagaactttgtttaaatgagaatatgtagttttgagagagactctctcctctaagaaaagttcacaggtattgagacatcttattttagtgcttagaagatttttattctctgctgatttctgatttgtgactttttgtctcaagaagaaaaatagtccattctacctcaaaagatagctctgttaaggaatctggattggatatctagagtttagagggttttcttgtttttcatttttttcactaatgagagagcaggcaattgtggcatgtgctacaacttcagaatggtaagactttgattatatttctgagtcttccacttacaggttaatcaagttagttcaatcttcattattaaagcactttttaaattacaggcacagttatagatactacagatataataagggttatagtaaatagcttttcagttatctattgctatagaaccattcacctcaaaacgtattggcctaaagtaataatcattttattttctcctgattctgtaatctgcactggacttggctatgtggttcttctgctggtgtcacttgaagtctccatggggctgtagtaattttgatgataatctggtcctggcggatccaggagggcttcacttacaaatctggcatcttaatgctcctcttcatggtctctcttttcacatagactgatcatacagtgacctagtccaagctttgttacagcatggcaattggttcaaagtgtgagtaccccaagaagataatgccccgttggccattcacatgaccaagtctctacccagtgctggaggggaatgcacagcagtgagtttcactgggtactatcaaagtaatggcctactacaagtggttctaactaaacctgtgattttcaaagtgtatatcttaatttgttttctgttgcctacagcaggatacatgaaactgggtaatttataaaaaaagaagttatttcttgcagtaatggaagttgagaagtacagagttgagggacacatccagtaagacccttcttgctggtgaggattctctgcagagtcctgaagtggttcagggcatcacatagtcagggggctgagcatcctaactcagatttcttttccttttcttataaagccactggtcccactcctatgataatccatcaatccattagcccattaaccttctaatccataagtggattaatccattcatgagggcagagtcctcatgacccaattgcttcttaaaagtcccacctctcaatactttcacattgggaattaaatttcaatatgaatttgggaggggaacaaatatttaaaccataactgtgttctttcacatccctagaattccaaacaacacttcagagtgaagtagataagcctcaattcaacagtaagaatttcacttacaagtattaggcattagcagtgaagatttctattgaggaaactgttccactgctaagagtatatatattttagaatcatcgaactatatgatttcttttaagttaaacattttgtgattttatgactcaaggagttctcgggccacttagttgatctgtcctcagatgataacacatattcttatctactctactggatagtttccaaatggatgcaataatgtctccacactgcttagaagacctcaacagcaacactgaatgcgcccattggttttcaattcattttctgcatcacatcctgcatgggaaatacctctgctatttagagagttaatatccgtaattatgagcacttatgaatttacaggcaggtgttaacattaaggaagtcagtactgtgaacatatattcatttgaaatgtactgtcctgtatatgtgaccatgatatcatcattccctgtgaacagcacacacactattttatttctaaaattgtaagtatttttcaagtagcaactataacagctatcatatattgaatccttattgtatgccagtcactgtgctaggtgcttctcatatctccccctaaatactttcaaaacctcttcaaagttggtgctagtattattcccattgaatgaacaaagaaggaaatggaaacttagtaagtgatccaattccatgcagctaagaagagagtgccagagctgaaatgtgaatccagacttttctggattcacaaaaccagtcgtctttctctccagcatgtttcggtcctcccatacctcaccccattcctcttgtgattaaggacataagctaaggtgtgaggctttggcatatggaaaaggaacatacttgtcaagacagggctggactctggctattgccagcagcgtggatgggttctcaactttagctgcacattgaaataatcctaggggcatttaaaaaatcctgatgcctgggttccgctttttgaatccctgattgaaattagtcctggtgcagcataggcattggagttttccaagtagttctagcaatgcagccagggctgagaagccctgacatagaggaaccacatttaagtgcctccaagatgtaatgagctacttgccagtatcccctctttcatgtcattgcatgtaataatgtaatacttcttttatttatatttaattacttatttatttatttattttgaggcagtctcactctgttgccctggctggagtgcagtggcacaatctcggctcactgcaacctctgcctcccgggttcaagcgattcttctgcctcagcctcctgagtagctgggactataggcacacgccacaacgccaggctaattttttgtatttttagtagagatgggtttcaccgtgttagccacgatggtctcgatctcctgacctcaagatcctcccgcctcggcctcccaaagtgctgggattacaggagtgagccaccgcgcctggcccattgcatgtaatgctcctatatggaatgctcttactttgtttttccttgagaaactcctaatcatgcttcaaaacccagacccagtgaacaaaaaggaaataatcaaggggaaccaaaaagtgtgcaaacattcagaccaacattttaaaaatatccaggttaatgatcactacctcccaaagtttcttagcacattccctcaacatactgactgattctacctaaagaatttctgcttcttaattcttagactccaccatctgccccatctctttttagtcctctcacttttggaagagatgccccaatcactcctggttctgtgaatcaactgggagctagctggggaggaggaaatgatgccagtactccagttttacctttttaaaatctcttctgattatagaaaagtcttgtgaggatgcacagtgggctgcagggctgttgagctcatagaatcagtgagagtcacatgcggctttctctcatgggagggtaaaatgtgtttactcattcagcttagtgcagtttactatcatcactttatcctacacaattagttggatttgagggggcatgaaaaagatgagaaaaatgttgaaaatggaaaacactatagggaaaataacaactcttaacacgcttgagacatatctcaagcaaggctattggactatgggtaaaattctcccaaggtctacgttgtttattaaaacctattgtgggctgagtacggtgactcacacctgtaatcccagcacttgggggggctgagccaggtggatcacttgaatccaggagtttgagacccagcctgggcaacacaatgagaccccatctcttaaaaaaaatgtataaatgaggcaggtgtggtattgtgcatttatagtcctagctacttgggaggccaacgtgggatcacttgagtccaggaggagttcaaggatgcagtgagctatgatcataccactacactccagcctgagtgacagagtgacaccctgtctcggaaaaacaaaaacaacagcaaaaatacaaaccaaaaaacagaaaacaaaaacccaacctattgtgtctaattttttaaagatctctcaaccttgcttaagtgaccaacacttaaatcttctctaattgtttagtttacatttatttcacctcacaaaataaattgcaagattcttaagaactatatttgtcactgcatgattataccatcatcatcatagtcatcgtatcattcttatcttcatagctaacagttgtatagaacttaccatttgctgaatactcttctaagaacattaagcatataaactaatttacatattttatggttcacaacatctctatgaaaagttacaatatccctattttacatattagaaaactgaagcatagaaacattaattgatttcattttctaatgtacactcagttgataaatgggaaatactctgatgaccccagaaatctaattctgaggtctagattcttaatctctatatgttaccattttctggcatattcgtaaaaggaaaataagttattgttattatgaacaggtaacatatggttctctttatttaatgtactcaggaatgatagagagagtcactgctaaggtttcaaaaagacagtctagggaaagtacctcccttaaatatgcatgtgcaatctgtacatctatacatgaaaatgaaatgtcaatggcatacatcaaaatgttagcagtggatatttgggatggtgggattttgggtggcatttttttctttctttgtgttgttttgaacttttacaaatatttgctacattgaatattagatattgctatatagtatatattatatttattatccagaaggaaagaggcagcttatgagagtgtcagcaaagtataaactgtatcctttccctagaagaatcagaaaacaaagcctagaagaatcagaaaaccctaaaggaatcagaaaacaagcgtagaaagccatagaagaagaaattggaacagaaaagaaattttctcatgttcccctccttcctccatggtagccttatgctagcagcaggctgcagcccaggtaggaaggctgaccaaaactgaatcatgttggagctttgacatttacaagaactagacattttaattacttttctgatttaaactcatggagaatttttatcacatacttgtcatgggataagtcataggacctgctaagctttttttcagggcaaagaaaaaacaaccaaggagcagatttaaaaagaattaaaaaaaaaaaaaagtcagtgtgaggtggctcacacctgtaatctcagcactttgagaggccaaggtgggaggatcacttgagcccaggagtttgagaccagcctgggcaatatagggagatcttgtctctacgaaacataaaaattcattagccaagtgtggtggtggcatgtgcttgtcgtctcagctacttggagactgatgtgggaggatcgatcgcctcagcccaggaggtcaaggctgcaatgagccacggtgacgccactgcagtccagctgcataactgagagagaccgcgtctcaaaaaataaacaaataaaaattaaaaaagtaacgttagttacaggattaacccacccccaccaggagtcctgcctcgtttactatccatcaggagtccttcagtgtttaccatttgtttgcatatacaaatatttatgaagaaagagaggcagagagaggaaaaggagagaaaaagataaaatgattttatcatattttgtataaagtttaataaatatatttcacctttggccttttttaaagagcctgctaaaagattttagctacttttctacaatttctgaacataaaactcactgatgtttcttctgattttaacaaaacgttgagatagaccttgagggggggctctggattatgcaggtacgtatgtaaatgtgttatgggggaaggagaatacactcgactagctttgctatcaccaaaaaaaaaaaaggctcttcatgctagggataagctttcaacttggccttgaaggataaatagagaggtagtatagcacagtatttacatgcaagaacttaagagttagaaaagcctagattcaaattcaatgatcagtcctcctcctcctcctcctcctcctcctcctcctcctccttcttcttcatcttcagacagggtctcaatctgttactcaggctggaatgcagtggcaagatcccaagatcctagctcactagagcctcaaattcctgggttcaagcaatcctcttttctcagcctcccaagtagctgggatcacaggtgcacaccaccatgcccactaatttaaaaaaaaaatttttaaaaagactacatctcaatatattgcccaggctggtctcagactcctggactccagcagtccacctgtcttggcctcccagtgtgctgggattagaggtgtgagccaccacatccagccaatgctcagttcttattaattgagggacctgggataatctttccaagctaagttgtgaaataagaattattatttaatcacattttgttgtatctttcattttatattaacttaattaaacataatcagataacatagtattattgattatagatgtataataataataatgcaggtgtctttctccggatttatgattattatacagtctaactctgaatatgccaagcatagtgcctattaggaggtattcaaaaaatggcagcaggccagccgtagtggctcacgcctataatcccagaacttcgggatgccaaggtgggaagattatttgagcccaggaatttgagaccaatctgagtaaggtactgagaccctatttctacaataaatatacaattaaaaatattatctgggtgtgttggtgcacatctgtagtccaagctactcagcaggctgaggtgggaggatcacttgagcctgggaggctgaggcttcagtgagcccttgttgcaccactgcactccagcctgggcaacagagtgagacctggtctcaaaaaaaaaaaaataataaaataaaaaaaaaaaggtgacagcagctactaccaccatcagaaattggctagatcctcaaatagggggatgagctcccaggcagaaggaagaatgcacgtaggtgtgtttagaacatgctgattatgctacagagaacccaagaatgaggaagctgctttaagattatctggaaaatggaaatggaaacctgtataagcggaaataggaatgtcagaagtgaaaggagactgtggcatcttcatctgggtcccttcagcctcctctttggtttcatttgcatccctccagccccggaataaccccctctgacagcacattataaagctttcaagagcaggcgagagaaggcacaaggaaatggaatgaccgcactaacaagtaatgagtggttcccacacagccttttacaagggaattaatcttttattaagagaggaaagtatgcccaaatgcttcagggtctttttgctcatgattacacgtgccatgggaagttcaaattcctcctgagagcctccgtcaaaagcaatcttctaacgtctcctttggaagctgaaactctccagggattagtatcgtttttcttttttgatcttgtgtgaatgaggagtttaaggacaaaatatactgttggctgcttactaaatacctcctttctgtacaggatgctgagagaaattcaaagttgtgtgggtgatcctgtacactgatgggacaagcttaaaaagaaatttggcaattgaagtacactcatactcctgtcagaaggctgagctgtgtgtgcagatctggaaagaaggagcacttgagcctttagcagagatgctaagaagggagatgtattaaaaagtgtatccagtggccaggtgtggtggctcatgcctgtaatcccagcactttgggaggccaaggcaggcagatcacctgaggtcaggagttcgagaccagcctggccaacgaggtgaaacccccatctctactaaaaatacaaaaattagccaggtatggtggtgcacacctgtagtctcagctactagggaggctgaggcagaagagttgcttgaatccaagaggcagaggttgcagtgagccatagtggtgccactgcactccagcctgggcaaaagagcaaaactctgtctcaaaaaaaaaacccaatgtatccagcatccatgcattgagggcccgttatgggcaaagcactacatgggcttgggttctgccctcggagctgtcataatccggtggaggtgaaaaggctcctacaggagaacttctgacaaaggccaggatgcttgccagggctgaggcagggtgcccagtgagggcaggggtgagggcaggtgtgatttcacagaaaggaatgcaagagggtcaggtgcacacatgcgggtctgaaagggcgggtgtaggcattgcacgaggaggggcgcaaggagcatggtacaggacggaagagaggcccagaaaaggatgggctggcaagagagttcccttaaggttttgtgaatgctgaggacctctcctgcaggagtgaagagctcataaatgggaacaaggcttctgggcctacaggaaatgctaactataaaacctggagagaattaaatgttacctagaatgccattttagaaatgaaacatggcacacataagaagacaggtctgtgtagcggttgaaagcactaagtcgggagataaatagaaacacaacacctaatgctgtcatttcttagctggttggccttgggcatgtttctcaaactccctttgcaaaaaggctaattgtcactttcatttaggtggcaagatttcaatgagattgtccctggaagtactttgtacgttatctggctcatggtaaatatgcaaaagatttgactgtatcattattgccaggccagctcctcttccttgcgaagataaagtccctaaataataaaaatatagctaatatataagccctaaaaataatgttccagatctaacttgcaaccgtggagtttttggagacgtttgaaaactgtggaaggagagaaatggagacttcaatgcaattaggaaaaagagtcccaaaagccaagtatgctcattcttatagtatttgagcagataactgcatggagactcaaagggaatagagttttgtacagcattaatacaacttttcaatagcaaggattaaaaaaagaaaggaatggaggaaggaaacaaggcgggtaataaagaggaatgaaggaataaaggagacaagaaagggagatgttgaaggaaggcaaggagggaaggggaagaagagagagcagggagagaatgaggagagggagtgaagttaggaggacggaaaaaaaaggaagagggaaaggaagaaaagaagaaaggaagaaaagcagtactggtcctgtaggggaatgagattctgacaaatgaccctatctacactttcccccagaagtattcaagccaagaataaatgcttatgagggattcctgcatgagtgggttcctgcaagatttttaaaggcctttctaagtccatttttagatgaaactttggattttgaatactgcagatgatgggataatgcaaatacgtaaaacaaaccccttgtgactgttttcttgcagctatgctttcaaatcccaaagagcaaaactaaaattttttccaaagtcattatatgcataaaatgtgagctatcattactgcatgtccaaggctggcagataccttgctctttcactcaaatttgtagaagtgcatgacatttatgatctaattcctctggagtccaaccctcattaaacattcagaagtagtttctttatccaaattagcaaccaaatgacattttttcacttagggcaactcagtgctgcaacatttgctcatgaatacttattttttagtggaatttaagaaaaagggcccttgtccttacaaatctagacctttctaagaaagcatatgtgaccaatgtcacctttgattttacagaatttgacttttccccacttaaaagagcatctttgacttctaccaaggattcaggtcttgcgtatgctattaatttgactgttgaaatgtattattattacactattgtcttggattgaacttgcatttgccaccttaattcaaccttgaagacaacatgcactattgatcctcttgaatgggtttatttagagaagcatagctcagctctctgtaccaactgggggtttgaacacctgctgtgtctagattctgctatcgactacacagatctgggaacacttataggcactgatgtttactgtcatttttaagtatctgagattgtgttttatttatttctggatacaatggctaaggtttgcgtaagctgctacctctgaagctttgtagcagctctgtattctgaataaaaagtttttccttaggcatggtttattctgttatcaatcagcacattttctcacaagtatgactttttatttaaaaatattatacaatgggaaataataaatgttgtataacactgacttaagggtatttattcatgtaggtagaaagccaagacacgacacagaagaacttcctgcacaaagggacagcatgtctgaattttcatgttatgaaaagtcatgaggtgaagaatttccactagatgtttatttaaaagagctacatggtacctaatttcaagcaaataaaaaacaatgttgtcattttacgggccttgcaaatgggaaatgacctttaataggaggaataaacttcagccacgctagtttaaagacagaaggtggcatatcagaaagattcttggttcataaaacaaagcttgggattttttttttctgatcagagattgtatgagaagcttgtcagtatcctcaagctcagtctccttacttttagagaagacaaaactgacgcttagagaggagaaatgttcaggaaatgccctagtggaagattaccaactagaaccttggcttcctgaaacttggctcagttacctcagcccaactgatgtagaggaactcccctacaaattcagtatgtgccaggaccctcccaatttcaacctggatcagctggagtggcctccttgaccagtagagtaggcaaggtgggaccacgcatgagggctaacccttgctattaagggaatgctgctcagttctgacttaggctaggggaccacacttgatgagttctggaatgtcctctctggccctgatgctgtgagtgcctaacagggtgctgagtatatagttggcatttaataaatatgttttaaatggctgcatgcttgcccatcttgctatactcttctataataatcttaataaatcagtgctcttattatatactatgaccatattaatcttcacaatacctcattctttacggggtcaagttcaaactcccattattctgcttggaataatattatattccttagcctcttatctatctcaattaagacaatcttcctagctgtatatgaaaatcttgcctcttgtgtgaaaccttctttgattagcctaaatttatctcatctttctctgaaagcacattatgtacagcccacaatcagggcagccagaatgtgctgtggaattaaccccttcaggagtcatcgtcatacagtaaggaaatgggaaccagtggtgcagttgtgtgttcattcttcaaaaagtcactgatggcattgagtcccatttgcccaaagtggtgacctgctgtacaaggggttttactacatacagttcacaatttattttgagtgaatcttttcctccctccccatctcactttccctacaccctcatttgtgcttcctggggccacctcatagatatactactcgcaccttagtctttgtttcaaggcttgcatttaaagaaactcaaagtaagacaccatatattaaaaggcttagaaaaccacaaagtgcctagtgtagagcaatgcacattatataagctaaaattatacagattaaataagtggatgaatggaaactaagtaaaaaatatgccctatgtcaaaatatgtttggtggttttttttttttttttttttgtctcccgtgaagctgtcagattgtacgaagttccgaattcatgattagtaatatggatgcatcagagtttctgtttactcctatcatgctcctattatagacctctttttgccctggcaacctctcctttcctggctagtgcacccattccccagctgttgagctggccattagagaattgccctaagccaagcagagcgacttcattcaggaggtcacgtccaccctccagaggcagccaaagactgactggtatgatggggtcactaaaggcgattcccttcacctcaaaggggggttctgcagtaaaattcatgatacagagctcctgtgggatcaggctgaagctagaatctagctgatatcacatcagctcatctcacattgctcaactcctttccctcccttttcatgttttcctcactcccctttccctgagagccctctttcaatatatcacatggatctgaattcctatctcagggtttgattgtagagaacctgatttaagacacctcttgctatgcattgatcttaacctccaggttaagaccctttgaccacctactattatatttctcatataatgtggcaattcatttatttaaatatattgcagaaatttcacccacgcaaaaaggtaagacctgctgctccttattaccatttccatctctccctatgaaaagactaagaatactatttggcatctctttgtagaagcagccaaggaaggtatagactccattcagcacacggaataagaaagcgataaatttctttgcaaagcataaattaactttctttgaagaaaaaacatgctttttctgtttctggccatagaaattttactgacacatcatgtataatgatatttagtatagctcagctaataatttacaagaggccactctgaggttagaatattttaactgccctattgcttttgcaattgaagggaccagagcagctagaaagaccaaaaacaaccttttaaattccctaaagccttgtttaatggagtgtatacagtcaaacttcaacaattcatggctagattatctatgacagtgtttctcagactttaatgtgcaggggagtcaccctgggatcttgcttaaatgcatatactctgattcagtcactagggtagtggcggagagtgtacatatctgaaaaatctcttctaagatgatgatcccgagatagatttcactctaagtagcaaggtcttatatttttgtatttttttttgttcttctgttactatatggataatgcaatctaaagataagatttaaagttttcttttcttgttttgcattgctataaagaatacctgaggctgggtaatttgtaataaaaaaaaagattatttgtctcatgattctgatggctggtaagttcacgattgggtatctgcatctggtgagaacctcaggctgcttccactaatggtggaaggtgaaggggagccagtgtgtgctccctttcctttgatgagagagggcgcaagagagtggggagttgctaggctcgttttaacaaccaggtctcacccaaactaatagcgtgagaactcatttatccctaagggatggcattaatctgttcctgagggatccactcccactaggctccaccttctaataccaacacagtgggaatcaaattttaacatgagatttgctggggacagacaaaccatatccaaaccatactaaaagtctaacattgaggcccttcctgactgtgccaaattgacctccttgaccatgatgataaagtcttactccaggaacatataatggtcttgcacacggtatggaataaaacacaggctggtttttggtcaattaattttctagaaagaattgggctgagattggacttctcctaaatacacatcttcacctagattttagaaaaggctatcaccttaagtgataacaaaagaaaaataaacacagtcaatacaaagaccatgagaaatctggtttataacaataaagttctgatagtattctacctttcttgttctttggagctaccacttcataactggaaattttacttagtttttcaatgcctcacaaaggtccagtctttatcttcaacatgaaccatttaaattaaggcctatttttacagtaattcaaaattttctttttttttttttacttttttactttcaacttttagattcaggggtacatgtgcaggatgtgcaggtatgttacataggcaaatgtgtatgatggtgttttgctgcacagattattccatcacccaggtattaagcccaacattcattagctatccttcttgatcctctccctcctcccaccctccactctctgacaggccccagtgtgttgttcccccagtgtgtccatgtgttctcatcatttagctcccacttaataagagagaatatgtggtatttggttttctgttcctgtgttagtttgctaaggataatggcctccagttccattcatgtccctgcaaaggacatgatctcgtttcttttaatggttgcatagtattccatggtgtatatgtaccacattttctttatccagactatcactgacgggcatttaggttgatgccatgtctttgctattgtgaatagtggtggaatgaacatatgtgtgcatgtgtctttataatagaacaatttgtatttctttagttatatacccagtaatgggattgctaggtcaaatggtatttctgcctctaggcctttaaggaatcatcacactgtcttccacaatagttgaactaatttacactctgactaacagtgtaaaatcattcctttttctccataaccttgccagcatttgttttttgactttttaataatagccattatgcctggtgtgagacggtatctcgttgtggttttgatttgcatttctctaatgatcaatgacgttgagcattttttcatatgattgttggccacatgtatgtcttcttttgagatatgtctgtttgtgtcctttgcccactttttagcagggtttttttcttgaaaatttgtttaagtttcttatagatgctggataatagacctttatcggatagatagattgaaaacattttctctcattctggagattgtctgttactctgttgatagttgtttttgctgtacagaagctcttttgtttaattagatcccatttgggggatcagccatttcagcctgcagtctttggagagtccaagctgactagggcagaggcagctccccagcacggcatggctgttttgtcaaggcgtggccagactgattaaagcgggacctcaatacattcctcctcactaagtaggacctcccagccagagcctccagccaccctcactcacccatattctatggagacagctctgatctttccctgggatggagtgtctgacaggaggggcaggctgtcaccttggttgttaggacaactcagccattccagcctgtggcctttagaggcagaggaggttcccatcacagcagggcagagtccccagcccatgaaaccactttttcctcctgggcctctgggcttgtgatgggagaggctgctatgaagttctctgacatggcctggagaaattttccctatggccttggagattaacattaggcttcctgctacttatgcaaatttctgcagccagcttgaatttctccccagaaaatgggtttttcttttctactgcatcatcaggttacaaattttctgagcttttatgctcttttcccttttaaaacagaatgcttttaacagcccccaagtcaccttttgaaggctttgctgcttagaaatttcttttgccagatatcctgaatcatctctctcaggttcaaagttccacaaatctctggggcagaggcaaaatgccaccagtctctgctaaaacataacaaaagtcacctttgcaccagttcccaacaagctcctcatctccatttgagaccacctcagcctggaccttattgtccatgtcgctatcaggcttttggtcagagccactcaacaagcctctaggaagttccaaactttcccacatcttcctatcttcttctgagccctccaaactgttctaacctctgcctgttacccagttccaaagttgcttccatatttttgggtatcttttcagcaacaccccactctacttgtactaatttactgtattactccatttttacactgctgctaaagacatacatgagactgggaagaaaaggagggtttaatttgacttacagttccacatggctggggatgtctcataatcttggtggagggtgaaaggcacttcttacatagcggcagcaagagagaatgaggaagaagcaaaagtggaaacccctggtaaacccattagatctcatgagacttattccctatcatgagaatagcattggaaagaccagcccccatgattcaattacctccccctgggtccctcccacaacatgtgggaattctggaagatacaattcaagttgagatttgggtgggggcacagccaaaccatatcagtagcctagtctttagctttaagaaactttctagtttctagaaaaagaagataaaacctaatgcaagtagaaggaaagaaataataagcattacaaaatatattaatgaaatagtaaatagaaaaatggtagagaaaattaaacacaccaaatgttggttctttacaataatcaataaaacagatatacttttagaaagactaaccaggtaaaaagtgagaaggctcaaattattaaaattataaatgaaagagatgatattactacttacctaaccaaaataaaaagggtcaaaagggaacaaaatgaatgattttatgccaataaattatcaacctggagaaaattgacaactttctagaaaggcataaagtaggaaacttatttaagaattaatagaaattttgaatagacctataacaagtaaagagaataattaattaaaaaaagctttttttaaaactttttttaactttttaaaacaaattttagaaaactttttttaactttttaaaacaaattttagaaaactttaacttttaaaacaatttttaaaaactttttttttaactttaaaaaaatttttttaaaactttttttaactttttaaaaaagatttttaaaacctttttttttttaaaaaaaatgctgaggatcagatggcttccctggtgaattctttccaagtttaaagtagaattaacaataatttctcacaaactcttccaaaatgtagaagaggaaaaactttccaaccattagctcaggctagtattatccttatgccaacctcaaacaaagtcattacaagaacaaatacctacaattaatatattttatgaatataaatgcaaaaattctcaacaaaacactaagaaagcaaatctagcaacatataaaaagaattacacattgtaatcaagtaggatttgttccagaatgtaagactggctcaacatacaaaaatcaatcaatgtaacataccgtattaatagaacaaaaaacaaaaatacatgctcatctcaacacacacagaaaaatcatttgacataatctgacatactgtcataaaaatattcaacatgtacagaagcaaatattcataaaaaagaaaaataatataaacaaaaaatactcaacatataaagaatgtaaaatactttaataaaaggtatctacaaaaaatcccacagataaccttacatttaatgacaaaagtctgaaactttttcttctaagataaggaacatgacaaaggcatgtgttcttggcatttctattcaacatagtaatggagattctaggctgagcaattaggcaagaacaagaaataataaaaggcatacagagtataaagaacaaataaaactgtctgtatttgtagatggcatgatcttttacatagaaaataacaaggagaggaggcagatcaagataaccaaatagaaccctcaagagatcttcccccactcaggaacacaaaattgaaacagacaaaaaaacataaaagaaagttctccacacaagaaagcaccttcataagaacaaaaaaccaggtgaatgatcacagtatcttgttttaaaatcatattaataaaaggagcattgaagaggataggaaaaactgtcttgaattgcctatattattcctcccacatccccaagcagcactgtgtggtgggagagaaaatctgtgtgtttggggcaagaagagtacaattattgtaggactttgctttggaactcaatgctgccctgtcccagcataaagcaacacagggcagaattcagctagtgtcctcggagggagcatttagaccatccctagtcagaggaaaattgcccatccccagaggtcagagtctgagttctggctagccccactaccatgggctaaaaggctctggggtcctaattaaactagaaaggcaggaaaggccacaaggactgcaattcctgggcaagtcctggtgctgcgatgagctcagagccagtggacttggggtgcatgcaacccagtgagacaacagctggggctgccaaggaagtggtttttttgcccctccccccaacttcaggtagcacaactcacagctctaagaggaaaggaaaaagtgaagaggactttgtcttgcagcctggataccagctcagccacagtgaaataaggcaccaagcagagtcctgatgtccctgttctaggttacatctagggcatttctagacccatcctgggccagaaggaaatcaactgccctgaaggaaaggacctagtcctggaagaatttaccacctgctgactaaggagcccttgggccttgagtaatcatcagcaggagccaggcagcagttgccacaggccttaggcaaggcccactactgtgctggcttcaagtgtgacccagcacatttccagctgtggtggccatgggaagagactcctgcttgaagtgaggagaaaagagtaaaaagaactttgtcttgcaatttgggtgccagctcatccacagtaaaaaaagcatgaagcaggttcctaaaggtccccattccaggccttaggttctagagggcatttctagacctgccttaaatcctgagtgagtttcaaagaaggaaacccactgctatgaaggaaggaggcccaagcctggtagaactcactacctgttgactaaagagtccttgatccttgaataatcatcagcagtagccagacagtagtcaccatgggcctggggcagtggtggccatggggaaaaactccctcttcttgaggaaaggagaggaacaagtaaacaatactttgttttgcaacctgagtatcagctcacccctagtaaaacaaagcaccaagtagatatataaagccctcaatcctatgccctagctactgggtggcatttctaggccccccatataccagaagcaaacctgcagcactgaagggaaagacccattcatgacaggattcaccaactgctgactaaagagcccctgggccttgaataaaaatcagcaatgtccaagcagtacttgctgtgggccttaggtgagattcagtactatgctggcttcaggtgtgacccggcacagttccagcagtggcggccatgggagtgtttgcatcacccacctccaggctgctcgcacagagatagacaccatttgtggtggtaatccagggaaatttcccagatcttacccaagaccaccaaggcaatacctctatgagactgcaagagtcacagtgtttggcatgccttcaaatgcacatgcagctgcagtgaacaaagacagatctcaacactaaattccctttgaatacttggaaagtcttcttaagaaggacaggaacaagcaagccagacagtgaatatcagagtaagtacctagctcttcagtgcccagacattgataaaaatccacaatcatcaacattgtccagaaacacatgacctcaccaaacaaactaaataagataccagtaaccagttctagagtgacagaaatatgtgacatttcagataattcaaaataattgttttgaggaagcttaatgaaatccaagataacgcagagaagaagttcagaatcctattgaatacatttaacaaggagattgaaataattaaaaataatcaggcagaaattctgggggtgaagaatttaattcacaaactgaagagtgcatcagagtctctcaacagcagaactgatgaagaagaataaaagattagtaagcttgaagacaggctatttgaaaatacacacaggagttaacagaaaaaagaataaaaaataatgaagcatacctacaggatctaaagaatagcctcaaaagggcaaagctaagaattattggaggtaggggtagaaagtttattccaaggtataataacaaagaactttccaaacctagagaaagatatcaatattcaattacagaaggttatataacaccaagcagatttaacccaaataagactgtcacaaaacatttaatagtcaaactcttaaaggtcaagaattaagaagggcttctaaaagcagcaaaagaaataacgtagcatataaaggagtgccaatacagctggcagcagatttcttagtggatctttacaggcgaggaaaagtggcatgatatatttaaagtgccgaagggggaaaagaaaacttttatactagaataatgtttctagtgaaaatatccttcaaacatgaaggaaatacaaagactttcctagacaaacaaaagctgaggaattttgtcaacaccagacctgtcattcaagagatgctaaagagagttcttcaatctgaagaaaaaagatattaacaagcaataagatatcatctgaatatgcaaaactcacttgctattcgcaaacctcatggtaacctcaagtcaaatatcttaaaactgttacatgataaatataaagcaagaaattaaaatataatgctagacaaaataacttttacaaaaaggaagataagatgaaagaaaggaagggagagaggaagaaaaaacaaccagaaaacaacaaaatggcaggagtaagttctcacttaccaatagaaacattaaatataaataaactaaattctttaatcaaaagacatagtggttgaatgggtaaaaaaaccccgtaagattcattggtccgttgcctacaataaacacacttcatctataaagacacacatagactgaaaataaagggctggaaaaagatattccatgcaaagggaaatcaaaggagagcaggagtagctatactgagatcagataaaatagatttctataaaaactacaaaaaaaagacaaggaaggtcattatacaatgataaaggaatcaattcagcaagaggatgtaacaattatatatatgtgtgtgtgtgtgtgtgtgtgtgtgtgtgtatatatatatattatatatatatttccaacactggagcacccagatatataaagcaaatattattaagctaaagagaggtagagaggtagactccaatacaaaaatagcttgaggctttaacaccccactttcagcattggaaagatcatccagacaaaaaataatcaaagaaacatcataattaatctggactatagaccaaatggacctaatagatattcacagaacattacatcccctggttgcagaatacacattcttctcttcaacttatggatcatcttcaagaataagccatacattaggccacaaaacaagtctttaaaaattaaaaaaagaaattatatcaagtattttctctggcaacaatggaatagaactagaaatcagtaacaagaggaactttggaaactatacatggaaattagacaatatgctcctgaattaccagtgggtcaatgaagaattaagcagaaaatttaaaaattatttgaaacaaatgataatggaaacacaacataccaaaatctataggatatagtagaaacaggactaagaagaaagtttatagcaataagcaacatcaaaaatgtagaaaatcttcaattaaacaacacaacaataaatattaaataactagaaaagcaagagcaaaccaaattcgaaattatttattgaaagagaataataaatatatgagcagaaataagtgaaattgaaactaaaaaatataaaagatcaatgaaatgaaaagttggtttcttgaagggataaacaaaattgacaaacctttagccacactagagaaagagagaagaccaaaagaaatgaaatcagacatgaaaaggagatattagaactgataccacagaaattcaaaggataattagagactactgtgagcaactgtatgccaatgaattggaaaagctagaagaaatgaataatttcctagacacatacaatctatcaagcttgaatcatgaagaaattctaagcctgaatagaccaataacaagtgatgagattgaagccataatcaaatgaatccaagcaaagcaaagcacaggaccctatagcttcactgctgaattctaccaaatttttaaagagctaatttcaaccctactcaagatattccaaaaaatagaggaggaaggaatacttccgaactacttctatgaggccaatattaccctgatgtcaaaatgagacaaagacaaaatcgaaaaaagaaaataggaccatgtctctgatgaaccctgatgcaaaagtcctcaacaaaatgctagcaacctgaattcaatagcacattaaaaagataatttatcatgaccaagtgggatttattccagggataaaagcatgattcaatatatgcaaatcaatcaatgtgataagtcacattaacataataaaaggcaaaaaccatgtgatcatttcaattgatgctgaaaaagcatttgataaaatttaacatcctttcattataaaaaccctcaaacaactaagtatagaaggaacatacctcaacacagcaacagctgtatatgacagacccacagctagtatcatactagatgggaaaaaataatggaaagcctttcctctaagattaagaaacaagacaaggatgtccactttcaccgttgttatcccacatagtcccagatgttctaactaaagtaatcagtcaagaaaaagaaataaggggcatccaaattaaaaaggaagaagtcaaattattctcctttgcaggtaatatgatcttatatttagaaacctaaaaaaactattagaatggataaacaaatttaataaagttacaggatacaaagtcaacatacaaaagtcagtagcatatctatatgccaacagcaaacaatgtgaaaaagaaattaagcaagtgatcccatttacaatagctacaagtaaaacaagataccaaggtgcaaacttatttaaagaagttgaagagctctacaatgaaaattataaaacactgatgcaagcaattgaagaaaacacacacaaatttgaaaaatatttcatgttaatgggttagaagaatcaatattgtgtaaatgcccatactactcaaagcaatctatagattcaatgcaattcctatcaaaataccaattacattcttcacagaaatagaaaaaataatcctagaatgtacatgaaaccacaaaagacctagactagccaaaatcatcctgaggaaaaggaacaaaaccagaagaatcaggttacctgacatcaaattatgctacagcactatagtaaccaaagcagcatgtgtactggcaaacaaacagacacacagaccaatagaacaaggtggagaatgcagaaatagatccatacatctacagttaactcatttgtgtcaaagttgctaagaacatacactggggaaaagacagtctcttcaataagtggtgctgggaaaactgaatattcatatgcagaagaatgaaactagacccctatctgtcaccatacacaaaagtcaaatcaaaatggattaaagacttaaatctaagacttcaagctatgaaactactaaaagaaaacattggggaaaccctccagggcattggtctagggaaaaattccttgagtaatgccccccaaaaaagtcaaccaaataaaaaatggacaaatgagattaatcatatcaaattaaaaagcttctgcacagtaaaaaacaaacaaaacaaaacaaaacaaaacaaaaaacccaccaaaaatccaaaaaacacaaaagaaaaccgtaaaacagtcaacaaaatgaagagacaactcacagaatgagagacaacagttgcaagctatccatctgacaagggattaaaaaccggaatatgtaaggagttcacacaactcaacaggaaaaaagatctaataattcaatttaaaaatgggcaaaagatataaatcggcatttctcgaaagaagacagacaaattgcaaaaaagtatgtgaaaagtgctcaacatcactgatcagagaaatgcaaatcaaaactacaatgagatatcctgtcatcacagttaaaatggcttttatccaaaagacaggcaataacgaatactggtgaggatgtgaagaaataggaaccctagtacacggttgggggaaatgtaaattagtacagccactatggagaatagtatggaggtccctcaaaaaactaaacatagagctattatgtgatgcagaaatcgcacttctaggtatatactcaaaagaaaggaaatcagtatatgaaagagatatctgcactcccacacttattgtagcaccattcaccatagtcgagatttggagtcaacctaagtatccatcaacagaggaatggataaaaaaaaatgtggtaaatatacacaatggagtactaattctgtcattaaaaaaaaaaaaaaaatgaggccgggcatcatggctcacacctgtaatcccagcactttgggaggccgaggcaggtggatcgcctgaagtcaggagtttgagaccagcctggccatcacggtgaagccctgtctctactaaaaatgcaaaaattagctgggcttggtggcgggttcctgtaatccctccacttgtgaggctgaggcaggataattgcttgaacccgggagacggaggttgcagtgagttgagattgcgccactgctctccagcctggatgacagggcaacactccattcaaaaaaaaaaaaaagagatcctgtcatttgcaacatggacagaactggaagacattatgttaagtgaagtaaggcaggcacagaaagacaaacattgcgtgttatcactcatttgtgggaactaaaagttgaaagaattgaactcatggagatagagagtaaaatcatggttaacagaggttaggaagggtagtcgggtaaggagaagagtagggatgattaatgagtacaaaaatatagttagatacaatgaataagatatagtatttgatagtacaacagagtgactacagtcggcaataatttgttgtacattttaaaacaaccaagggagtacaaattgaaagttcgtaacagtgagatgatgaatacttggggtgatggatacctcatttatcctggtgtgattattacacattgtatgcctatatcaaaatatctcatgtaccccataaatatatatacctgttataaattaaaatatgtattacaatttaccataaaatatgcccataaaaattaaaatttaaaataaaaaaaggaatctagaaaaatgtatcaaagcaaataaaattcagcgagaattcagatcaacaaataaaaatcaatcaactgtgaaaacaagtttatctccttcatgcatggaaagtacttcaataaattgtatttcaataagtgaccttgtgaatggcaacatttgaatgactagtactcccacctataaggaattatggccatctctataatgggttaaaaaggttaaaaaaaaaatacaatgtctcatcaggggcttttgacttacaaacaaacatcacagagtccaccatacttcactccctgaactgccacttagaaacttatctcactgaggaagaacagaacctagtgaggtctctcttcctgggcctacgacagaaaaatgcgggtaggactaacctgctcacttgatgttgagcctcttgaagatagagcgttaagtcaccagtactcaaagtagtcattctataacatttactgaacacctactgtgtcctctagcactatgataatttattcaaccatcataataagaaagaaacatgctccttgagaacaaggactttacctggatcaatcaacattttacttctagcagctggaatgatgcttggcccatagtgggcataaaatatattagttgattgactcaatgacctgttaaagtctagtctttctttgtagcaaaactacatatcagaataaaatgcatgagagaaaatccagcctaatttctatcaaaataggttattcacaaaatatagtaagaaattaccaggagcacagcagtgtatcctgtggctgagaactactatgcctagggttgccaaatatagcaaatacaaatacaacatgcctagttatacttgaattttagataaacaccgaacaatatttcaacataaacataatgcaatatttggaacacatttatgcaaaaaattgtttgttgttcttctaaaatttgtttaactgggtatctggtattttacctggcaatcctaactgtactagataatgccccatacccaacacaataccaggatccaataggtattggttgaatggataaatgaatggatgaatagataaataaataaacaagtgtttgcttacaatctctacttctcttttttgggcacaatatttaggcaaatgtcagcatatgtcctattttatatcatctgcaacatcatcttctgcccttggaatcagagcttatcactgagggtcaagagggtcatttggcctgggctacacagtttcaaagggtttttattttagatttttcaaaattatctttagattacattacttatggggatggcattggggtataaaagtgaaagaaaatcactgagggccaagagggtcatttggcctgggctacacagtctcagagggtttttattttagatttttcaaaattatctttagattgcattacttatggggttggcattggggtatagaagtgaaagaaaatgtctatcaaacaactttaaaattaactgattaatagaccacaccaccagccttgcattagtttactactgccactctaacaatttaccacaaactctgtggcttaaaacaccacaagtgtattatcttacaagtctgaccatcagaagtttgaaaatgtgtcttagagggctaaatcaaggtgttggcagggctgcatcccttttggaggctctagaggaaaatccatcccttgccttttccagcttagaaaggcatgcatctctcttccaacagtggcatttctctaacctctgctcctatcttcacatctccttttctgactcggaaactcgggactcctttttataaggatccttgtgattacattgggctcactcagataatccagcataatatcccctcctctcaggatccttaatttaattacgcctgcaaagtcccacctatcatgtaaggtactgtactcacaggtcccagcaattaggacatggaactcctttggagccattttttggcctacaagaagcactgtaagttaattgtaatatattgcatggtgccctttacaagtgttcactggttaaatgtaaactttaaaaaattcacacatttttataatttgtgttctttttttaattttttaatatttttggaggctcttttgccttctgagaggtcctccttgaagcaacatgatttcttatctcaataatggaagaattgtttgttacaccaaaccagtggttctcaatcttggctacccattagagtcaacttttttgttgagttcctatgttaaggctgcacaccaaattaattaaatcaggatccctgtggaatggaccagaattcaatatttttaaaaggtactgaagtgattccagtgggtgtctgaaactgagggccacttcattcagtttatccttcctctgcttacctaacctgcttttctcttcttctactccttccctatcttctcttctggccccttttttcctgttatctgtaagtttgtctctctcccttatatactccaatacaatatattggagtatattattttatactccaatacaatatattggagtatattattttatactccaataagtataaagtatattttattttaattatgtcatattcaataagaaaaaatgtatagatgctctcaaaacaatcaatatggtatggcttagtgtgtatagacagaactgttctgggaacaaaataatgcttcactttaccaagaagcttcatgtctgcaaattccacacctctctgatcctgttttctcctccgtagaatgaagcgtttagaaaaaaaattctctatgttctcttctaatttataaactccacaattctaaatatagaaaaaagatcatgttcttatggaaggagttctggaccccaatatcagaatagatctgatttaaagacaaatgatttggcttagttttgcttcccccagaagaagaatcataggcaaggatttgcaggtgggttatttaggagataatcccaagaagcaccaggacatcaaagcaggtgatgtagggtggatcgtcaagagtgatgccactgtgtgccactggaatttaacgctttgggtaactctgggggccagtagagaatatgggcctcagagttatcccgccagaggcaagaaggagctggaggtgggaaactgatttttgatttttttcagtcattggttgatgactactcctggaaaacttaattctccagccctttctgcctgctgtgcacaaaggcagagaagtatggtagcaagagaagccctcaggcaatgagatgcaaatgttgacattcagatgtcaggtcaatgtgcaccacggggttgaggccaaagatataagcagatgccaatgcagttctttttaaaaaatggcagtaaattctttctccttatagatttaataaagacatttgagaagtaaatgaattagcatttctgaaacacattgagggcccttccacagcacctttgagtaagtgactataggcagagtactgaggtaagtgtattctctctgtttaaaaggctttttaggattcctttagacagcacataaacaatttcagcttatttgggcaccatttagttagattctgtttcagaccactaagtggcaactttttcaaatattgggaggttaaggaattagattttcatactgaaagtaaatgaaaataaatgttactttcagatactgacaaattatattgcaggtgtaaagaagaaaaggtgctgctggtatactgtgaatctcctgcttaagcccaaaaggagaaaggtggacaaagtactgatatttgtccttttcatacctgtgccagagcctgcagatgcgtaacaggaccatgtagatttgttttctccctaatgaataaaaaatgtcaccactgttgttcaggctcatcatggcgatgttctcctaagactatggactctttctgtgtcttactgtaacatactgaacaagctgtgttgatctcttcttgacctaaacattccagaacattcctgatgctaagggatttttttaagaggcagggtattactatgttgcccaggctggccttgacctcctaggttcaagtgatcctcccaactcagtttcccaagtagctggactataggtactcaccaccacactcagctgggataatctattttaaggttgggtaagtgggatagacttatctctaattttaatatctcacttagaatttcttcactgtggcaaaagataaatgttttttcttcagacccattactcttatctctcttgatatcattcgagggcatcagagacttccccatggcactcatggaaaagcaaaatcaatgaaccagatcccacctagtgtcagaaagtttcaaaccagagccactttattttgaataggggctgagtaaaatgaggctgagacctgctgggctgcattcccagaaagttaggcattcttagtcacaagaagtttatggttaagggaacaggttaatcatgtttactgaacagacgcaggacttactagatccaggacttaacagacccaggaaatgccctgatgttcccatatctcaggaacaaaagcattcttagtttaagcataagtttcatgttaacaataataatatagattcttgcagtagacagtagttacacaaagattaacaatcatttgtcatgagcctttgtaatagaacacatctccgcatgattttttgctttgtaatcttatacgtaaacaagcattgtacctaaggtggatgtgttcctcctcttgctttcaggaacatcgttctctgtctatggtgtaaccattcttgtattcctttactttcttaataaacttgctttcactttattctggattcaccttggattctttcttgctcaagatccaagaaccttcccttgggatctgaattgggaccccttttcaataacactagtgcagagtaaaagaaatgcaggagtgtagactcagaaatggagatagtgcaatcggggtgggggaggatgtgccccaatatgaatgaatctatgggtttagaccaggggagtccaattgtttggctcccctgggtctcgttggaagaagaattgtctcgggccacacataaaatatactaacactaataatccatgatgagctaatttttaaaaaaatagggtccatgcataaatctcgtaatgttttaggaaagtttatgaatttgtattgggccacattcaaagctgtcctgggctgcatgtggcccatggactgcgggatagataagcttgctttagattgtctctaaaacagaagcatatatttgaagccacccacccccatttgagctgccagatgacccaagctgcataagtgaccccagactagaccaacagaagaatcgcttagttaagcacagttcaaattgttcttccactgaatcatgagtatataaaatggttattgtcttcaatcactgagtctgtggtggttggttacgcataaataaataattaatatagtaatttaagcaacaaccagtgattgcttaataagggaagacgttgacatttcaaaaatatttgaaagattatttagccctggttaaaatatctcaagattttattgtaaactctttgttgcaggtaggcccactgtgcatcagatatatctcgtaaactcccttctgtgccgttgcttatgcatcccctaagcgtgggatgccttctctgctcctctcagcctgcctacagaaagctgctctccaaaataaacctcctccataatgtttgccttgcaaacattattattaagaccagcctgcttctcaataatttattcagtcactaaacccatataaccctaataaaattcacttatttggcactatatcaaccaattcgaaagccttatctcccatctggactacaagcttcttgaaggaaatatgcctgcacctagtatggtatctgtgacatggctcaagatgtgtgacagcccacccactaaagtaggtgactttgtgtttgcctactgttctctgagttaacacatggcaggaggggaagaatcagaacacgatgaaagcttctaagtgcttggatcttagctctttaaatatgaaactgttgacttttttatgaaccttcactttttagttccaaatatattttacaaatatggaaaaataccaggagagtgttatcctcagagtcattgctgagtattgttgctgtggatgtggttgtaggagttatagtgcggttcacacgggaggtggcaggggtacttcctcacggcaacaaagtgagtaaacacggaagtccttcaatacatttgtggtaccaaattccactgaatgagcctcatctccacttccttatgtttctttctgttcttcctctttacaacacacttgggaggcagattgaacctctggtcctgattttagtcaataaggtcaaccctacacagaaggatttcctttcaatttagtgattctgttttttgaacttcaagaaggtcaagttttagagatattacatttctggtggatgcgcctttattcttgatgataattttaaatctcgctccctaagggagaatgactggcagctatcaacaggaactgtaagaaggtctaagccacacaagcataaaaatgcaaaagaagagtcagctcaagcttttctctatggaatgtaatgtaaaacccagaaacatttacagagttgacctaggagagaatctgaaaacaaagacagaatttcctgggactgttttaacctagaggttgaaatggatgcctctggaaataaatactaaaggatcccctttcataccttcttggtttcaagttcaagggttcaagggtagtgtgcttcttcactctatttctaattcattttagaatttgagtcacccagaagaacttaggtaccaaatgacctggagtataagcatgccacttatgtgatagagattttaaaggaaaataatcaagcccatgtctcctgtttcaagggcctgctttggctaaatacgtgaagcaacttgctcaatttcttcaatagtagtgacagtcattattataaacaacctagcacacactacgttcttcctttgcactaggcacattttgctaagtgttttaaaaacaaaatttataattcaaatagctcggcaatattgatatcattcttaatttacaagtgcagatgtgagccttaactaataactgatcggtactgaagtaagaaagatcagcttatttgccttgaggtaggaccaactgtgggtataatttatactctagagcttcctttgggatcaagctgagattggaattcacattcattctccttcctgctttggttctttcctttctattagcttccctcactattcctgagagcaattccttaataaatcatttgctcatgaatcttcatctcaggggtagcttacttaggacactaatccagaaggatgttcttatttattataggactaaagaaaggtcgatgatacaacttgttccaaatcacaaggttagtaaagatgggagcccacatttgaactcaggtctggctccttctcaaagtcatattgtaaacctcaccttatactttctttcttagactgaagaggacacagcaactaaggtataattcaatagataacctgatagtgtcatgaccctcatcatgcccagctcatcaccctcagcctcctctaactcaagaacaactatctcttcacagatgttgaagatatgaggttctccgatattgagatatagaggacaggaagcaaacctccctcccctgctagtacattgatgtagcctgagaagttttgttttcctcagtttttgtctcttaatttgagaaaatgctttagacacagtcacaatttgagaagggagggatatggattaaaggcagatataaaaggacaactagatgctattggaaaatgtaggcgatgaaataaagccctttgttctctgaattctggactttgtttgtagggggtgcacagctttgcaggccagttgcattcattccactgactcaatctgttctgtaaaacatctccagttgcatgactatgacctgacctaaaacttgacctaactgtggcaccaaagcaatttggtttttttttttccccaatacctgcctaaatgctgtatttccaaacggtgcaggaagcagtcttatcactttttgccatgtaatcataaaagtatccgagttttcctcatgagtggactacacacacatgttacttgtgtggaggtagctcctataagctttaatcattagacaaatgttgatatattattgtttatcttacattgattcattatacaatttacagatacacaatatacgcacaagataaacaataaaagtatttttcagctagagttgcctagaaaaagtcacagactaagattgcaagaggtacgagagaaggtgaagacaaaggaaagagaggcagagaagggtggaaaacaaggtcacaggatattgtactagttattatttcatgatgatctgtgcatagataatagtacgttgtctggcaggagcttagccccatgtaatgtttctggacaggtgttgcaaagacattgcccacagagcagtccatgaaaggaaatatgatgaggacatttatttatttacttgcctgatccctcctgtgtcctattttctactgctcaaaggtgatctcctagtggattgactcctagcatttccagttttgtatcacctagtatttagcagcttctcttataaagacagacactgggttcctaagcatggcatttacgttagtcagatctcgtaggatgaaccagaaactcagctgtgtggtaagcctgacattcccgcaggaagcaactggtggcccagttgcacaggtccagtcactgttggtcattgcccagcacctaagagcatgggactgagaatctggagaggttggcatcactctttcttggaccttctgccaccaggagaacaagcatgaagaagcccgctgaaggttgagcgatgacatggagcacagatgaaccatcccagctgaggccatccttgaccaatgctatggtttgaaagtttgtgtctcccccaaattcacatgttgaaatcctaacattcaatgtgttggttttaggagatgaggcctttgggaggtgattaggccatgagggtgggaccctcataaatgagattagtgccctcacataagagacccccaaaactccctgtcccttccaccatgtgaggacaccgtaggaaactggctgcctgcaaatgggaaagggtccctcaacagaaactgaccatactggcatgctgatctcaggcctagcctgcagaactatgagaaataaatttccatggttttaagccacccagttaattgtattttgttatagcagcataaataagataatcagcgagatctgatttaccaacgaactcacccaacatacataagcaagctagccagagtcaggcgagaccaggccagatgtgtaggacctcccagccaatccacagattcataaacaagaatgcatgtttattactgtaaggcacaaagcttttgtacatttttaagcagcattattgtggccatagattaccaatcaaaatcttaacaacaatcctacaaggtagacatgactttttttgtttaaatgtcaaccaatatggaagcagaaatgttaaacgatttggccaacatctcacattacacttttgattggaacctagggattcctaattccgtggttttaattgctataatttacagcttaattttccttagatccttgatatttattatttattgactagtgacatttagtggataatttgatcatgttgtcttcctccttaaggtactatatcttgtttaaattttatgttttcagagcctggagttttgtaattaagtaaatattaaggatatggaacataaagtagagagaaaatatcagaaagagcgacagataaaatatactaaaggaaagacagttaagtacatatttttaccgtaagggagagaagacaggtgaggcttggggtggagtgatgtgcacagtgaactcataaggggattgctggtttcctaggtagcttgagcatgatgcatgcatagatctctgtggttcaagattttttttttttttttttgagacaagagtctcgctctgtcgcccctcagcctcccaagtagctgggactacaggcgcccaccaccatgcctggctaatttttttgtatttttagtagagatggggtttcaccatgttagccaggatggtctagatctcctgacctcatgatccgcccacctcggcctcaggattttataacttatttctagaaaaactgaatctctgatttgctttgtctgttttttgaaagatgtaatcatagatgagttgtacagacgtggcttatggaatcagtttcatgcgttcatttacagccataccctataaactactgctgccagagtgaagacctggtatctatattcaatcacgggttctctgccctatttatctagctggatttgaaaaccaaagcaaactacatgcagggtgaggccagtcagaaagtctggactgcctgaggcgccagcatttatacgtctgccccatcagtgtgatagggagagatagccctcattcccattagtgttaatggagccaatcataggaatccaccacatatcaatgtgtatcctctcatgttttgatatcttaatgcacaaaatttcatctctagggaaaggcttgtctcctcttaagtgctctaaattcccattaatactaatggaacaaagatacatacacccactgatgctcagaaaagtgggcaaaatataggagatgattaggttttaggagtgccataagagattcacggaagctgcagggattgtctaaaatgatccatctttccaagcttatttaagcagtttcatatacagagccaatttttttttctcagaatcatcaacagataattggccacattccgctctccaggaggaagaagctgaatcaatatatgtttgagaacaccctaatatcctttgggatgctgggtgtatttataaaaaaagagagtggagagggttctagaagaaccccagatttttccaggagagaacacagaggtaggtcagcccagaggaaggaggagaagcagagagtgtgggggcttcttttagcgggtttctccaggcagcgggaagaactgacacaatctctgcaggctgctctgtgctgcagaagtgcggtgtgagctagtaaactgcccattattcctctgcctgcattttcttttaaaagatgctgttttaacttataggacatgcaagataagcaatgctggccttaccctaccccttcactttgtagagagggtaactgatgcaggttcttacatggtctgaagttattaaagagataaaattatacaacttagagataaggctatgtgagcagaatataaatggacatgataataagccaacctttatttgacctctcaacaagtttggctggtttttctcctgttgaattagaattgtgtccttttagcgatcttccgtagtttaaagaagaggcttgtctggatcagccacacccgtaggcagcctcagatcatcacttgttggtgggattagagaggtgctgggagggacccctaagtgatttaaatccagggaccacagtgtccaaaactcttacagaattagtttttggctgaagccttacttttttgtgtgtgttttaaatgtagaacaaaagaattgttgtgagaaataaactatcattacatcctgctattaatacctttgagacaataatttcaccagagagtacctggacataattcagaggacaaggatgcttcaaggggaaggagaaagtgaaaaaaagaaatagaagatggaaagaaatcaagatgagctttgcctacactgtctttacagactttgagaggatgaaaagagtaaatgtatcatggagttgggtgcacactataggaggtatgcttcctatacacagtcttccttacctttttaaggatgagtgttacagatctattctgatatcctgatgaaagctacagaccttcttgtaaaaaaaaatgtgtacacacacacacacacatgcatacatggtttcagggaatttgggatgttcacacgtcccttgatgtccattcacagacccccacttcagggaaacggcctaacatgtagaagagttcaaggtcagaactaggatggcgacggattttacattacaaagaacaatgatcttgggtctctcatttctaacaatctcatacggaggatgaagtttttggtaaaagtggacatttattgaagatttttgtgcttttactgatacataatatttatacatatttatgggctacatgtcatattttgttacatacataaaatgtaatgatcaagttacagtattagggtatctatcaccttgtgtatttatcatttctatgtgttgggaacatttcaaatcctctcttctaactattttgaaatatacaatacattgttgttaggtatagccaccctactctgctattaaatattaaaacatattccttctatttcactgtatgtatatgttcattaaccaatctctcttcattcccacaccccgctacctgaaccttcccagcctctggtatctactattctattctctacctccataagatcaacttttttagctcctacatacgaatgagaatatacaatatttgtctttctgtacctggcttatttcacttagcataatgacctgcaattccatccatgtagttgcaaatgacatgatttcatttgttcatgtttttacttttctagttccttgagatacattgttacattttttatctgaaatctttctgctttttaactgtgagcattttttgctataaacatccttcttaacactgcctttgctgtatctcattggttttagtatgttgtgtttcaatcttcactggtttcaagaaactttttgattctctccttaatttcttccttgacccaatgtcattcaggaacatggtgattaatttccatgtatttatattgtttctaaagttcctcttgttagtgatgtctacatttattccattgcattctgacaagatagctgatataatttcaattttttaaaaaatagggattttttttttgtgtcctaacatatagtctatcctgaagaatgttccatatgagaagaatgtgtgttctgtagccgtttgatgagatgttctgtaaatgtctgttagggccatttaatctcaagtgcaatttaaatccattttttgttgttattaattttctgtctagatgatctgtctattgctgagtgtagagtattaaagtccacaactactgtcatattggagtctatctctccctttaatctaataatatttgctttgtatatctgggtgctccagtgttgggtgcatatatgtttagaattgttatatcctcttgctgaatcaatattactatcattacgtaatgaccttctttgtttcttttttttaaatgtaaagtctgttttatctgatataagtgtagctatgtcctgcttgctgttggtttccatttgcatgaaatatctttttccatttctttactttcagtctatgtatctcttcataggtaaggtgagtttgttataggcagcatatagttgtgtcttgttttctgtttaaatttattcagccagtttatatattttaaatagaaagtttaatcaatttacattcaaggttattattgatatctgagcatttatttccatcattttattaattgatttctggttgttttctatactcttgtttctttttttctctctcatggtttatcattgtggttttgtggttttctgtacagtggttatattcaagttatttctcctcctcatttatgcacttgctctaccaatgagttttatacttctgtgtgtttacattatggtagatattattcctttcacttccatgtgtagaactttcttaagtatttcttgtaggaccagtgaagttgtcatgaatttcctcaggttttacttgtttgggaaaggcttaatttttcattcatttatagagaataaccttgctgggtatactatccctcactgacagtttcttttttctttcagcactgtaaatatatcatcttattgtctcctgacctataaagtttcttctgagaaatcatctggtagtctgatgggtgttcactcagtaatgactggatgctcttctcttgctgtttttagaattctgtgttagcctttgacttttgacaggttgacttcaatgggtcatagagaagattttttgaattttatctatttggagatctctgagctttcctatatctggatgtctaaatttcttgatagacttgggaagttttcagctattattttgttatataggttttttttaccccctttggttttctctgcactttctagaacacaaaatagtgaatatttggtctctttatggtgtccaatatataatgtaggctttgttctttttttaaattattttttatttatttttgtctgactgtgtttttcaaaattttcaaattctgaaattctttcttctgcttgatctagtctattgttgaagttctcacatgtgcttttcattttattcaataaattcttcaattccagtttttctgtttggttcttttacatatatatctctttggtgaatttctcattcatatcttgaattgtttttctgatttctttgtattgtttatttgtgttctcttgtatctcactaagcttctttaatgtcattgttttgatttttttctggcatttcataagtttctttttattaacatcagttgttgaagaattattgtgttttgggggaggtgccgtaattccctgccttttcatgttttttgtgcccttactttgatatgtgtacctctggtataacagacacttcttccaaatttttgtatttgctttcatatattacaatttttttttccctgaagatctctctatggtgttgtttggttaggtcactttggctttgaatctgggtacttgtaatactgtagtctaaacagtattagtggtatctgtgatttccttagtggcttggagtatggttgctagtaaaggctgtagtgaagttttgtcggggatgtggataccatatgggtcagttcttgggccccagtggtggaagcagtgggcgaagcatgcctgtccttgggccccagagcagcatatgctgacaccagtgttagtgggtccagaaaggccaaatctcaggcattcaggcagcctgcttgggtgttggcagtagcagtggagggctggggtttgggtggatcctcggcccctgggaaacaatggcagtggtgggacaatcctctggcttccaagcagtttatgtgaatgttggtggtatgtgcaatggcctgggcaggccggttcccagacttcaggtggtgtgtgcctcaggtaggaggaagttcttcaaatgttagcaaatactgattcctcaaacaaatatacttgatttgaggtggatgccagctgtgggagtagtaacaggttaagtggactcatcctctggctcctgagaagagtgctcagggaccaaccagtggtggatggagcaatgcaatctctaggatgccaatagtatgcttgggtgctggagagataaaatcagaatgtctcagcatcccccacaacgaaagctgtgcatgtgggcactggctgtggtgggcaggggtagggtgatcccagccacctcagcagagtgctcagtggggatggcaatgactatgctatggccttgctactggggaaggcagggttgctttcagtggcagcagctgggggctgggggctgggtaccacacactttgtctctgggtggtagatataggtatggaagcctgtcctcaggatgcttctaaatgctcagcagcccctctgctgggagtataggatcattgctaatagttcatgcttcagccttgttggcagcagccagcagtggttgtggctgtgggtgggggatgttaatgggaccccaggcatatggcgatgcaggtgctgtttggccccagggcaagatgctatctgaggcaggccaggcttccaaaatggtgctgtgctgtagctacttaggacttgggaagtgtgtgggacctcctgtgagctccctccgtgagcaatactgtctcacagtctccaggaagctccctatgttagtctcagggcaagtggtcaactggctctgcactggctgagattgcagaatccctgttgagaacaagggtcactgggggtctctcccttatctgttttctgcattgggaagcctccctgggctccaagccagctccagatgagcaggctgccttgcttccctctccttcttggcctcaagtgtttcctgtcacttctcggttgaattccagtgttctttcttagataatctattcaaagtgtgattacctatttgctaatttggttttactttgtggaggaagcaagtgccacttgcctctactcaggcatcttgaagcccccttctgaatggacattcttgaggctcatggaaatactaaaatttgctgatacgggttgcagtggtatgtgttgaaagtgttacgtaaataactaggtgtgggaaagaattaattttaaattggtagacctatatagtcatgtgcacagaatgattttgcaaattattcaagccttctgtcctacccctttattgcgtgctctctctctctgtcagacttcttccatattggaatcacttaagcaggaaagaattaatagatctttagcagcattccatcactgagacaccaactacttctccttgtttacctgcctcttaattgctgtggtttcctaacaaaagcctaccatgttggaatagtgccctattccagaatatctatcattcttgttcctaatatatatatattttttaccagcaaataacacactcagtattatacctataggggcaggaacagcagataagtatttttaaagattttgaaagacaaaatgcaaacattgaatttcatggggttcagaaagaaaaaagataactttttcatatggggtatagtgattacttttaataactcttaactgttgcatattgggagaaagttcttccaatgtaaacaaatgctgaatcctcaatcaaatatatgcatccttgagctcgcaagacacagatgactatgccctcaattattgaaggataagcttgtcttgttttagctccctattttctaaagaaaacataaaattcccttggtaaacatgggtaaataatacagaattgcatcttacttgctttatttatttattttttattttacaagtcattatttgaagttgaatggaggcagttaaggcaaatcctgaactacagttttatttgtacttaaaccagatgagtcttcctctggaacattaaagcattatttccagtgatacccacaggtccactttaaagctctcttacaacgagtcccattatttcagcctgaccatttgcttgaaatgatagagaggggtacaaatgagataagaaccctgtccacaaattcattattcttaactgtgtttacaaatggctgtgtctgacagtccactttgtcaatgactgctgcagagctgattgttcctgtggctgtgagaagtgaaatgaggggtccttgactatatctaatttgtgaaggtattgaattatttctctgtaaaagtttccccattcagtatgaactctttaccaaggacacttaatcacatctcatggaaaaacagggacctcctgtaggttacacttagttacctggcatggatcatcttcatttatcctcttttcagcatcactccaaactcctggttgctaaacataacattatccagtgctcataggcaaggaattcccagatgcaattctggaagataggctggctaagaaaacaaggtactcattttcttaaattccaaggcacttttcgtaagaaagaaaattaagaaaatatggttagataattacgttcaccgtagtttatcttattagtcactctctccttccttggcttcagatgtgaaaaaatgacagatgatgcatagtaagtcggaggatttgattagtaggtagatatggattatgagtatttagaggtgggttataaacatctgatggttataacagaaaatgatctgctagccttcatcaaatctccttcaggcaccacctttcaattttacttttcataaatagtagttgagagtgaggagaagatgctaatcaaaggtctgtaatactataaacctggtgttaccaattacaaatagacttagccatagataaaagtctccaaagagattgtggcaaatatgattgaagtgtgttattctaaacaggggtatagttgtatatataatgaagtacctactgtaaatcacaccatttctggataataaaaagctgatggtttgatggcttacatcttcttacgcattttgtgactatgctcagatccagtgatgtgaaccagtggtaagaagatgtgtatgttccagtgaaacaccatccctactaaaaatacaaaaaattagctgggtatggtggtgggcgcctgtagtcccagccactcgggaggctgaggcaggagaatggcgtgaacctgggaggtggagcttgcagtgagcggagattgcgccactgcactccagcctgggcaacagagtgagactttgtctcaaacaacaacaacaacaacaacaaaacaacaacaaaaaggaagacatgtatgttcaagctattgcacttacgctggtcccatgtcaaaatgccacacttctgatatttttcccatggtattctctatagtaaatggttggtattacaaagtggtctggatcacagagaagacactgaataatcatcttcaacatacaaactaagtgacatttcagaaaatcagacattaaaaatggaaaattgtaaattcaactgattcaggaccaagactgcagcagaaacatctaagctgaattgtcatctgtctttgtttattgctgcaattgtgccactgaataccctcctttctaactttctgctttgatctagtgagaagaaactatatttgaattgtatctaaagtgcagactattaggttctaaattatattctgaggggttatattagtccattctcatgctactagaaagaacggcccaagaccaggtaatttaaaaaggaaagaggtttaagtgacccagtgttccacatggttggggaggcctcaggaaacttacagtcatggcagaaggggaagcaaacaagtccttcttcacatggtgacaagaagaagtgccgcacgttggggaaaaagccccttataaaaccatcagatcttgtgagaactcactcactatcatgagaacagcctgggggtagccactcccatgattcaattacctcccactgggtccctcccacaacatgtagggattatgggaactacaattcaaaatgagatttgggtggggacacagccaaaccatatcattccacccccagcccctcccaaatctcatgtcctcacatttcaaagtataatcatgcctttcgaacagtccccgaaagtcttaattcattccagtattaacccaaaagtccaagtccaaagtcttatctgagacaaggcaggtcccttccacctatgagcctgtaaaatcaaaagcaagtagttatttcctagatacagtgggggtacaggcattgagtaaacacacccatttcaagtgggggaaattggccaaaacaaaggggctgcaggccccatgcaagttcagaatccaatagggcagttattaaaacttaaagttccaaaataatctcctttgacttcatgtcttacatccaggtcatgctgatgcaagaggtgggctcccatggccttgggaagctctgagcctgtggctttgcagggtacctttcccctcccggatgctttcttgggctggcattgagtgtctgtgacttttgcaggtgcatggtgcaagctgttggtggatctaccattatggggtctggaggacagtggcactcttctcacagctccactagggagtgccctagtggagactctgtttctgggctcacaccccacatttcccttctgcactgccctagcagaggttcaccaggagggctctgcctctgcagcaaacttctgtctagacatcctttgaaataggtggaggttcccaaaccccatttcttaacttctgtgcacccacaggctcaacaccatgtataagccgccaaggcttggggcttgcactccctgaagcaatagcctgagctctacgttggcccctttgagccatggctgggatgcagtgtaccaagtcccaaggctgcacaaagcagcaagccctgggtttggcccaggaaatcattttttcctcctaggcctctgaacctgagaggggctgctgcaaaggtctctgattaacatttggctccttgttacttatgtaaatttctgcagcaggcttgaatttctcctcagaaaatgggcttttattttctattgcattgtcaggctgcaaactttccaaacttttatgctctgcttcctcttgaatgctttgccacttagaaatttcttccaccagatatcctaaatcatctctctcaacttcaaagttctacagatctctagggcagggacaaaatgctgccagtccagtccctttggtaagcatagcaagaatcacctttattccagtttccaacaagttcctcatctccatctgagaccacctcagtctggacttcattgttcaggtgactatcagcattttggtcaaagctattcaacaagtctctaggaagttccaaattttcccacatcttcctgtcttcttctgaggactccaaactgttccaacctctgcctgttacctagttccaaagttgcttccacatttctgtgtatctttattacagcagtgccccactattagtccattctcacactgcccaagactgggtaatttataaaggaaagaggtttaaactattaacagttccacagggctggggaaacctcaggaaatgtacaatcatggtggaaggggacacaaacatgtccttctcatggtggcggaaggagaagtgctgagcaaaggggtgaaaaccctttataaagccatcagatctcatgacaactcactcactatgacaagaacagcatgagactccatgattcaattacctcccactgggtccctcccacaacatgtggggattataagaattacaatttaggatgagattcgggtggggacacagcgaaaccatatcagggattcacctatgagtaaagttcacagtggagcttgggggatcaatgcatgccactcaagcatttttttcctttagactctactttatctagtcattattattgtagcctaaatttgttactgtattttaagacctgtaaatcttgcttagcatttattagtcaaggtaggtagattaaattgtgaaagcaaactatcctgagatttcaatgtgtgaacatagcaaaggtatacttcttgcttatgtgatgtccactgattgtcaagaccacccccaccccacaaggcaactgtcctctgtacagcaacttgttattccaggtcaataggatgctgtaactattacctggactattggaaacaagtgggctcctattcaatcaagtgagggaagaaaaactggagaaatgtgtgtgggcttttcacagctaagcttgacgttgtacacatctccgtccattggctagaactagtcaaaagtctccaccacagcaaaagggcaagggtgtttagtctccttaagcttccgcaatcagatttgggcgagtactaggcgtgactgtaatgacatttataatctcaaagtaacattgtaactcaagctagaaaaatatctagttttcagcttttaattctgtgtcctcttattataatcccttgatgctacattgccacaaaagaagaaagaaaaagaactgcatttccttttgtttgtgataaacaggagggcacaatggctggtgttttcaggtcatgatttattggttcagccggaaccactgcaatgctacattcttctaggacactcagcaacacagcaggccttttaaagaatcccaactggctcccacgctgaatagaaaagaagggaaaagtatcatcccagctagctttggctgaaatgaaaatctgctcgaaccaaaaatagaactctcatggggattgtcttttaaaaagaacggcagggctcagtagttctatgtgacatatgttgaatcatttaaaattttttccctccacatagtttagtcagaaactaaatggctttgaggtaggaaaaaataatgaactttaactcaaaaagacatttcagaaatttcagaccagggcagccaaggtatttgtcagcccaggctattttcctttattccctcttgctcttggaatgtaagtttctaaaactctattgaatggcaatcctgtaatatcttactctattattgtcccccatctctcctgatgcatgcagttatcctctctggaagtgcatatctaacattttctatctgttcttcctatctataggacattcaaggtcctctttcaaaactctcagctccccaaggctttctgtgcatgtgctttatgttgtgcaattatcactttataaaataccgtccttttctccaggagctcctctatgtggttgagaacttaatcacatgctggtttacgcaacaaatgttggaattatgtcagtcatgtcctcccagagaggtcaagtagcccttgacataccttttctctattgaactcaataataccaagttgatgttgcagactgggatctcagtagctatttgttggttgatggtaccacacttattcaaactggggtaatgtgacttttctgagacatgtggagtatatatcaatatgctctttggccatccctgatgatgtggtctcatctatccacttccaaatgactgctggggctgagtccctattggagccaaggggtaagccatacattatgctgttcctgtccctgatggtattgagaacccattgtattgctgtctctggaacattggagagatctgtagataggattaccattcttaattctttactcattcctaaaatatggttatatgtttctgtgctcctttaccatatgattttccctcacagcagagcaggcagaatatgtatgtaccctcatcctgtccattttgggctcatgtaacttcctttggccaatggagcattagcacttggatcctatgcaagggccttatgcttatagtttggcctcttttgctctattctcttaagaaggatctacctttggtgtttatttggcctcaaaatgatgaaaacacgtggagcagacttgactgtgatcagcagctaagaatccctcgtagcccacctgacccaggtaagcccagtcaatattagccaaaccatgactactttttagaacagagtaagaaaaataagcatttgagaaaaaacactgagatttggggataaggaaattgttacacaaaattatcacagtaaaaatcttacaaaaaaatagattcggtggtgcgacatccaggatagggaggcctcaaagacaaaccgatcataaaagagtagttgctggtttgagggaggaagcagggaaaacactggaagaaaccagtgtgttcttactggaaagacatcgtacaataaaagaacatggcttcaggcagatgaccaggtggagtggctgcccttttggcactgacttctggtgacaatcttccctatttgcagaaattctcttttctgccacactggcaaattgtgctacctttcagacctcaagattctaatatgatgtaaagataagtagtacagtgtagtggttaagagaataagctctagagcccagctgtctgggttttaatcttggctctgccactttactgacttcctgaccttggcaaattatgtagccttgtcatgtcttagttttcttatctggaaaatggggcttgtaatagaatctacctcatacaatcattgtgaggattaaatgttttaatatgcataagtacttagaatggggtcaggaacttagtaagttctcagtaagtcacagctattattaatgtcattattgtttaaccaaaatttagggcacagaagcccatagtactctgctgggtatcctgtaagaaattcagatgaatataaacatggccactgccctcaagaaatgtataatctaaaatctgctaattttgtattctctgaccttactaaatttttaaattagttctgataggggtgtgtgtgtgtgtgtgtatgtgtgtgtgtgtgtgtgtgtgtgtgtgtgtgtgtgtgtgatttgtagggatttctacatataggataatgtcttctatgaacagagataactttattcctttttaaatttagatatctttttttttcttgccaaattgctctggctagtatttttagtattttgttgagtagaagtgataagcatgggcattcttgtcttgctcctgatctttgaatttttcaccattgaatatgacatgaattgtcggcttttcatttttggttattattatattaagatatttttcttctatttctagtttgttgagaatttttataatgaaattgtgttatatttcatcaaatgctttcttacatttattgagatgatcctgtgtttttaatcctttattctgctatgtggtatatctcattaactgattttcatctgttgaaacatctttgcattacaaggataagtctgatttggctttggggtatgatctttttaatgtgctgttggatttggtttactgatattttgttgagaatttttgcatccatattcaacagagttatggcctttagttttattttattatagcatttttttctggctttggtaaaaggagacggtggcctcataaattgagtttgaaagtattgtctctttttcaattttttgaagaatttgagaataattggcattaattcatctttaagtgtttagtagaattcaccaatgaagtcatctggtcctgggcttttctttcactggtgtaaataacttttaatatgaaaatatacaaaaatgctgtagaaagagcacaatgaacacccagatttatctattgctagcattctgatctatttgtttataaacacatacacataaatgtaacttttgtaaaccattagggagtgggttgcatacatcatggctctttacttttagattcttaagtgtgtatttcctaaggaaaagaatattttcttttttttgagacggagtcttgctctgttgcccaggctgaagtgcagtggcgtgatctcggctcactgcaagctctgcctcctgggttcacgccattctcctgcctcagcctcctgagcagccgggactacaggtgcctgccaccacacctggctaattttttgtgtttttagtagagactgggtttcaccgtgttagccaggatggtcttgacctcctgaccttgtgatctgcccaccttggcctcccaaagtgctgggattacaggtgtgagccaccacgcctggccaagaatattttcttacataaccataatcacttgtagatttcaggacatttataaaacgactttccttccagtatatgattcagtctaggattacacatttcatttaattgccatgtctctttagttttctttaatctggaactattccttagcctttgttttcagttataacattgatatttttaaatacaaccctcaccttataatgaaatatgcctcatttagggattccttcgaatccttcaggactagattgaggttgtacattctcatctagaatattgcatgggggatacaatgcccttgtcaagatatcacattcagaggcatacaatgtctatctgcccctcattagtgacatagattttgatgatacagtcagtgttgtccaagttattccccatcaaatggttattcaatttctgcacagtatagttaggatgtttccttttcgattaataaaacagtctgtcaaagacacttgagatcttccaactatctatcttctcatcaaaatttcttccaactatctaccttctcatcaaaatttcttcattaatttagcattctttgatgatccttgcctgatccaatctttgctataatggttgaaaaataatgatttttccaactccggctcatcagccttatctactagtcagtaatcagcattttatttaagcaagagccctccttctctcctgtttatttattgatttgtctagctatttttggtacagattcatgaattaccatccttaaatactttggtgtgcatattgtcctctatggagatggcaagagctccttcaacctagtcccgtgtccttgatccttttgccataactgtatatgtgtgtgcacgcacacacacatgcttgttttttcttttgagattttttaaattttttaaactttctggtgtaacaaacaactctggacagaattattttctttggccttgtaacagaaactcacaagctcatgaagtgatcaacttcagaactactgccttcattaattctttgttataagcaactaagctatgaccgcaacccttactgaaagttgcttatcagtcacacagcttatctaaaagctctttcccttagaaatggccttggttggttcagaatttcagccctgaagcctgaccatattcttattcagtgctctttctacttctgggctcaggtgtttcctgcaatttgagattgatagatggttaagctaatatgttaccaggcaacgaagattatgaatcacaaattcatacaataatgtattttcaccatggtgctctgtgggataaagaaaagctggggttaaaaatggaggatgttctgagactggagaatcgcttgaacacgggaagcggagattgcagtgagccaagatcgcgccactggcactccagcctgagcgacagagcgagactctgtctaaaacaaaaaaaaaaaaaaaaaaaaaaaaaaaagaaagaaaggaaagaaatggaagatgttatggagagctcagacttctcatggaagccttcttgctatctctaagatctttgcccgagatgccccctttagattggtgagttggagcaatgtctctttcagctcatccccagaggagaaaacaaaggacaattaaagacttgacaagtcaccaaaacattctttctttgaaatactctaagatgcagttatctaacattaacatcaagacccatatgtggtgggcactgttggtgccttacccagatcccttgtaccgggacagtacccccatacttagctgctatgaatgttggcagctaaaaggtcacagctgctcccttctgtagagaattcttctaagctaaagagagctccatgcccaggaggctaagctcattccccacttggcctcagggcaacacgaagccagggatacagatgctgatccctttacctcaaattgggcccaactctggcgtaatcatgctccatggatccccagaggatcagggttagactggacttcagaggagcccagtcctgcttagctagttcccttctcccatctgcttctttccctcccttagagatctcccgattgcactctcaataaattatatgtcatgggactgaaattcccgtctgaggccctgtatctagggaacccaacctacatatgtcagaataatctgggaaacattttaaagttataaataatctcatatgtaagtgattttaaaaataagcagaaatgcatatctttgacatgaatcatttgaaaaaaggaaaaataatattttaaaccatgctgtaatatcctagtactaatattcatttaaaagcatcaccatctcccagttgtattagttggaagtcccaaagccatctttgacttttttccctctgacctgctttcaaccagatgcaacctttgactgcagaatcgctcacttctgcagcccacttcacactcccagtcaagaacatcatgacctcttccctaacatgtcctccttgctgttatttctcctcctttcttcccctcctctattccctaccacatctgtcatgcaggtcaagctctgcatccggcaaaacccacactggtctcagctggtctctctagcttcctactggtccactggcctccttgtaccatttgctttctctatattcagaataaactctgacagtgttctgcatattcttatctttcttgtctttgagcttgcttcccctccactcaaaatgtttcctctccaccttccctgcttgaaatcctatgaaaattcagttcaaatgcttgtgtctccatgaagccttccaagattccctgaaaaaaagccagtttctctttctcccatatttcctctggcttttattatttctctagcaaggctcttcccgtattctacttgtcactttatcaccagtgaatgcatctcacttctgcactgtgccataagtgattgaggaaaataattgtatcttattcctttctatgtccatctcttcagttcaccccgcttctgaccttttaagcttggtcagcttacctatatcctgcatggttcattaaaaataacagcagaaaacaatgtctgtcccagataatgcctcagatcattccttatcgacatgtcacaccctgcttcttgcttttctgtctttatgctcacctttgccttttctgcctttatgctcacctttgccttttctgcttcttgtccatttaaatttagtgaccattactacttgtccttttgaacttttgtatttagtttatagtttggctctgggctcaacccatttggtgtcccctgcagccttgggtgagagttgctttcccaaagcacatacttatcaaggatgcaatatgtatgtgtattctagagcccatgggaacactcagccctgtttgctttcaatgagcactcggtctatcagtataatttcatttcaagcatcctttgaggaaatcagaaaggtgacagcttatctactgttagctcccctgcagctctccattcaaggtaaggcaaccacgcctagactctcccttgagtttttctggtcagttgcctggccaggagaaacaggctccagcctctcaggccattctactctccctctccccctttcctgtagttgctatcaatcttcctactgtgaacatgagaagtcatttccatcctattaaacactgatgctattgagaactctttggttgcagatgacagaatatatagttcatgtggtgtcaacaaaatggggaacttatttgttcttataatttaaacttccagggtgtgtctgaccttaagtgctgtaagactcagctgtagtaacagcattttcaggaatctgtgtcttttcatcccttgacagtaagaaatttttctccatataagatttaatctcagaaaggctattccacacagtagtgatttggcctccaacagataaggatttatattgtactaatttggtcactctggaggaaacagagttcaatcttcacaaatttgagcctgaatcattggactctttggggtcctaggtccaaattcttgaaccgagcaccttggctggggaagtaaaatactctgattgcactggtctgagtcctaggtcatctctggagttcagaggtgaggttgatttcactcaaaccatatagactgactttggggaagagacttttcttcaaaagaaatgtaaatataagctccagaagaaggggagatggatactgggtgtctcaagtgatatacatctactatattccttttcacctgcactttcccatgagataagcagctacgagaggctaaagatcaaagaatttcttataggtaaagtcattggactgggccatggctcaatgagactttctgataaatggaaatgttaagccaattgatatttacaacttcttttatatacaaattacatgtttcccaatgggtcagaatattttatttactttattcaaatgttaatttgcttttcatctctgttttttttttctactccctcctctaatcatttaaccatgccgtctgaattttctttcctcaaggatttttacaagactgaaagaattttcttgaaatgtagagcctttactcttctttgtaaaatcttaagggaacatttctaagtgtcctggagagggtggagagagatgaacaagtctaagggagaagctagagactagacatttccccaacttggtaagctgctgaagggcttggagcatattcagccttcttgatcatggaaatagtagaaaactgtttgaggagtacttacattgtatcagacccactactaagtcttttatgtatatgatttgattattcaattcatcagcacaattcttcaggaaaaacggtctcaatgccattttagagacaatgagctaactgtagacttaggcagtttgaggcacacatattagaccaagtaggatttgactctaggcatgtggggatcttgaacccatagcctttctgttgttacactacaggttagccaaagcaaaggtcatttacccatgcttttctgtgtttccagtgaaaagggaactggaagtcacaaagaaccaacgagttggtctacacgtaggttttacaaccaatgagagggaggctgtccgccagtgtgtggaccctggctcagccaacttcaagctgttatcttttaccagtgtttggtatgttcgcatcctggttcatacctttagttttgtttcctccctacaagctcaggattcatggaagttctcatggagagtgatggggaccatggtccagagaccaaaaagataggagtgaaagactttgggaggtcccagttttctttaattgcacttacataggcctttgcttattggtagaaaaatgtctattaaattttctctttccagtttaattccttttttttttttcgagacagagtcttgctctgtcacccaggctgaagtgcagtggcgtgatttcggctcactgcaacctccacctccagggttcaagtaattctgcctcagcctcccgagtagctgggattacaggcacctgctacgccaccacacccggctaatttttgtatttttagtagagacagtgttttaccaagttggccaggctggtctcgaattcctgaccttgtgatccgcccgccttggcctcccaaagtgctgggattacaggcgtgagccacctcactgggcctacctagttgcttttaaaactgctttccattttgtctgaattgactcctaagtggttctttgtaagtgaaagtgtcttataagtttcaaaacactatgaaaatgttagttgtagctgtgtcagtaattgatatttaaagagagaaaaaacttcattttgactgtcccactcttcttaaatttgagaagctctgaactctgacatctaattattctcataattatagctagagagagggagaattaaaagtaaaattcaagcaattacatgtacaagggcaaaagttgttatgttaaaatgcatagtccattgtaattttttacttaagatggttgtaaaagaaagcatctaggtgcaggaagtgggagcaaggcctatacattaaaatgttgacctcaaagacccacaaatgcatttttaattttttcagccccaaatagatatcttagataaaagtattatgtgtgagacatgaggtaatcttgtagctttatagaaagacaaaaatttttttctaataaatatttctagatttttgagtattcatttattatatacctatatcttaggtatgtttattacaagcctaaaaatatcttttcattccacaaatgccaacaagactagaatttctcattagaaccagctaaattgaggatagaattaaaacaagtggaatcttagtagcaattggtaatttaaaaaaagagtaaacacattcttcatggaaaggaaactacctctcccagccctgctgtggataatgttctgtttattgatttgcttatttctttacccacaggttactggatctatgttttaattttttttaactttttgttttgaaacaattgcaagttcacaggaagttacaaagaaatcaaagggaggccctgtgaaccctttacccatcctcctgcaatgtaaacatcttgcataactgcagtactattatcaaactcaggaaatcaatattggcacaatacacaaagcttattcggatttcaccagttgcacatgcaatagtgtgtgcatgtgtgtgtatctttatgcaattttatcccaagtgtagctatgtgacccccaccatcatcaaaatacagcagaacttttatcaccatggggctcccgcatgctgcccctttacagccatgcccaccttctcctctcagggctaacccctgttaaccactaacctgttcactgtcactctaactgtgtcatttcaggaattctatatacatggaatcatgcagcatatatttctttcatactggtaattttcattcagcataattttcttgaggtttatccaagttgttgtgtgtatgaatagtgttcctttttattcctagtggtgttctatgatgaatgtaccacagtttgtttagccgtttgctccttgaaggacttataaatgtagaaatgtatttagcaatttctatgtatattttagttgagtggctaatgaatattagacataagctggttggttatgaaacaggctttgattaccaggagtgttggttttaaacaaagggagaataagaacgaggcagccatctaggtaacttcctgctagaaggtgtggccgtggaattcttcctggatcttgaagatgctgctaagaagagtggaaatcagaacaaagtcccagatttgagcagtcccccaatttatagaatggcaatagattacttccgtacttttccaacattaacgtgcatatgaatcacttaaccatcttgagaaaatgcagattctaactcagaaggcctgaaagggcctgagattttgccattctatcaagctcccaggtgatactgaggctgctggtccacagagctctctttgagatgagataatagctgagattcccctatcacttaaaatacttttcctggctttctttagacaggattagaggctaagcaatcaaagtgctggggatagaagattacctggcaggaattcagaaactcaagatatgccattgagagaactgagaggctagagaaccagccagtcctgcctccttatgggctcacctgggattggcatttgggaactgcggatcacttctccaggaccagagctttggcccttttgagcagccatggcaaagagcatgtctggtgggacttggtgagtctctgcagtacccaggtcttaaatactgtatatatcctaaatgaacccctgggagcccacttaagaaggcttactaggaatacgaaggacagttagcagtgagtaatggactaggttgctctgtaggctcagtgatgtggaggctcgggtcaatgatgctgagccgttgacagcactgcgtgtgtgtagtgttggcagtggaagaattttcctcttcttatttcattttgctttcatgcaagaaagtggttagatttattctaggtccttccaacagagcttaaataattagtcccaataagttgaaaatttgagtcaaaaataagaatagttttgacaattgttgctgactgtcaacattccaggttgacttatgaagtgatgtcattctggtgtgaggcacaatgcaagagggtgctctattggatctatacaatgatcaagtgggaagacggtcagccagttctttctgtgaggagccagacagtaagtaagtaagtaagtaagtaagaagtcaggccatgtggtctctgttacaatcactcagctctcctgttgtagcacaaatgcagtctcatagagaatatgtaaatgaacatgcatggctatgttccaataagacattatttatggacaagaaaatttaaattttatagctttcatgtgtcacagaatattgttcatcttttgttgttttgttaagctatttaaaaatatgaaaaccgtccatagctcacaaaccattcagaaacatccagcaggccactgttggcttgtggttctgtttgccagcccctggactagataaacctccagatatcaagagtctgggggagtgaggaatctgcccttgtttggcatcctctgagaagtggtttcctccagctgagaaagaaggacttaccttccccaggtaaatcctgctgaaatgtgtttcagagagagatggctgtttcacggaatcttaccatgccagaagatccaatggtgtttgctgcttgcagtgggaactaggatctgggctgcccaaggttttcctttctcagactccaagcaatagattcagcccaggttccgtatcctctgccccagagggttttccccctttcatccggcttgctctgtggggcaggctgatgtgcctgtaaacaacagcccttcagaataatccctggcttcgttacagctttctgaggttgaactttgtggtgctttcagttactgtgactggctgttaatgctttccgtggttcttgaatgagcatcttagagcaacaaccctgtgctttctgctgcagacgtcaatatgcacccctatctgataatcaatattaggggttactgcaaacacaatcattccctgggtggataagtaaagtgaatctgttcccggctgaatgctgtcttttgtcttaacctttccactgcctttatctcatcagtgaagtttcttagatcagaccaagggggcagaaaatggtttgatctctgttcacagaagaagaaatgaaaaaatcaaggggttgagaaatttttgtaaggtcactgagcaagtccctgactgagctggaatgaacatgaacatgcacaagcataaaattctgaagctgatcagtctttctgctatatatatatatcctattctcttcagaaatacatttccacatcttagaattaaatgactgcatttccaggtatagaacttgtatttcaagagcaagatgggctggggattataaaatactaaccaggaaaaaaatggctggcttcacagagaattgataatcggttcgtagcaaataatgtgctactgtaggtgaataatgcatcaaggatagtactaatagaaaaagactaaatttatgtatactatggaggaaggacagtattcagaatttaaaaggccttcagttgcatttgattcaaccaactgagctgatcatgaattgaagcagacttagcatgtattggattataatagccattcaaggcttaagaacaaagctttataagaaagttaaaatatctaattactcaagtaattctaacaaaatcaggaaaagaaaggaattacaaaacataatattaatataattaatacatagtatatgaaatatatttttgaaattgctgaattactgactttatgaactaaatgtttgtgtccccccaaaattcatatgttgaggtcttagttctcaataaaatagtattaggaggtggggacttgggatgataattaggtcatgaaggtgaacctttcacgaatgggattagtgcccttatcagaagccaggtagctagctagctgtcttacctccacgtgaggattcaacaagaagttggcagtctgcaatccagaaggccttcaccagatctcagatgcaagcctccagaactctgagaaataaattcaagtaaaacccaatttctcttgtgtatactggtcgatgacattttattatagcagcctgaatggaacaacttataagtaacagaaaaaaagcccatgaagtacaatttatagaagaaacacaatagtaaaaaaaaaaaataaaaaataaattgagcctaaaaaagatcccccaactaaaatgaaaaatcactttattggattaaattagcaatgatttttaaaaaaacacatgattcagtaaaaccactatatcagtatatacacctatcaaaataactataataaaaaaaatagtgacagcatcaaatgctaactagcaaggatgaggagaaactagattactcagaaattgttatgagaatgtgaaatggtacagccactctggaaaacagatgggcagtttctcataaaaataaatttgtaacagccatgtgacccagaaattgcactcttgaacatttatctcagagaaatgaaaatgatgttgacacaaaaacaggaatacaaatgttcatggtagttttattcactacagtcccaaactaaaaacaactctgatgtgtttcaggaagtgaatggttaaataaactgtggtacattattatcatgtattattactcagcaatacaaaggagcagccatattgatatgcaacaaactagataaatctccaaagaattatgctcggtgaagaaaggaagcactcaaatttgcatactgtatgattccctttatgtaacattcttgaaatgacaaaattatagaaatgaatagactactggttgcctgaaattaaggatgagatggggacaggaggaaagtgggtgtagctatagaaaggcaacataaggaatctttgtggtgatgttaatattctatatctccactgtattagtgtcaatatcatggttttgatattatacccaaattttccaagatgttaccaccagtgcgatacatacggtaaaatgtatgcggaacttatctgtattaactccaaaaactatgtgaatctacaatgatctcaaaatgatgagttaatttttttaaaaaattatgattcttagagttcaaaaagatgtaatgaagtctgcttcttacctacatatttggtgtcctattttcaaatatgggaaaggttttgaaaatattttgagaataaaatgacctgaaatatttcctatatctgccttagccatccatcctacttttaagaactgattttaaggagttaacagaacatgtttgtaaagatttctgtgcaaatatgttcaatgttgcattatttacaacagcaaaaattttcaaacacacacaatatttaacagttaaggaatatttacagtattgatggtacatacatgttataaactctaatgcagaaatgaaacttgtttttataagagagatagtaggcaagatagcagataagattctaagtaagatagacaagcaggtaaaagaggcagtagtgccctgcagaggggtaaagcatgtgggcgctggctcttcaattcatggggttaagacctgatagcactatgtgctgaccttgggctggttatttaatatctctgtgtaccattttcttctttgtaaaataaaggtaatggggttgttgcaaggatcacatggtgctaatagtggaaagcacttccactggcactccataatatcaactactttttttatattttgggtcattttttaaaactccctacatttagtatatattattagttttataatttacaaatatgagaaggaaacagagttatcatggaacaaagaccaggcaataaaatgttaatgctagttcacgatgatgactacaaactgggaagaaccttattttcactgcagtgtttgtgatatgggttgagtacacttatgaattaatcctttattcatcagggaatctatggttttctgtacatcaaatctaggtacctttcaaatttccctgtactgcataattgcagtctgctttctctcccacattgtaactatctttactattcacagtggtccttgttgactttagctgccttcattctctcaactgcactgtccctcacttcccatactattcctgtttgttgacagttttccttgaacctgctgtctaacttttcagcctcatttttttttcatgaaactttcctgccaataattccaccatgccctcccaggtttctcttttcaaaatgccttctgcattcagtaccatcccagatgatttaacactttatggttaccacatagaatgttattttatgatgttgtttttcttcacgatgctacaagtgaataactcttatagtcttaactaaaatgtaagcctttgtggtcaaggctgtttttatacttctttagtgctacacagaaaaggtcactgttgaatgaaagacgagccaagggttggctgcctgggctggcttagccctcaggactgaaaagtgagatgtgcttcatcatgaacttggttatttgggggaagatcttataaatgacaggaagtggctgttctctttccagaactatcatgtggcagaaagtaacattaggcaagacatcctaggacctgaattgtgagactttaaaaattcttacaaagagcagctgggaaaacagtgtctctggaggtattgaataacatagtatctatatctgaggagttggagggcagccctgtcaggaatatggaaatgaaataaaatattctcctacaaagcaaatcatttataaaacacacgagatgccttatttatgtgtgatcttatataatcctaatacataaacaacaaaaggaacattttgttcaaataagtgcattttcttatgttaactctttaaagatagaatcaatgatatcagtaagactgttctgataaaaattagagagctaaagttgagattatagatgcctgttacatcccaatatcttgctttctgatttatttctgtatgttgttttgagctaaatcttgaaaagtttgatgcaatatatttaacaattcttaattattacaaaatcataggtactgtcgttttgtttttaaagagcttgtcttgcaagctctttaaagtgaagatattttaagaaatatcttaaagatatttaagaaagtttaagtgaagatatttttcacttaaacatgaaaacttgagaaagaactaagatattttggtttcctcatcaaacccctacactcttcaagaaccacttacatcatgttctctgtagctcttttgttttttttttgaaatgaaaaagtttaaaaggattcagagatcctttaacaaagaccacatactcatcactaagaatttagaaatagtggtattttctccttcttgtttcagatttatttatatatttatagacatggtgttacagacacttgaagccttctgttcagctccaactccaaaagaaaccactgttaggaaatttctttttattcttaaagctatctataatatattctaagaaaatatatatctatgtaacatgtagaactatattatacagttctcaagctttaaaaagcgttagaatttactgcaaggcttgttaaagcagatctctgggtcctacctcaagagattctgattcagtaggtctggcctggcccctaaatttacatttctaacaagtttccaggaaatgctgatgtcattggtccagacaccagattaagagtaccacttataaatatattatttcttacttttaaaaatactgcatgtataatttatcattttaagaaaagaactctatgcatcatttatcacttattttaaattcaaaattatgttctcatggtctatccatatgaaaaaatatctatatagctcatttacattaattgctctagaacaattttacaaacatttctttattgttggttactcatgtttttccaaatcgttgctattacaataaggctgcaatgaacacttttgtacatgtctcctaggatacctgtaccatgaagcaaagttgttaaatactagtgataagcaccttcacatttttttagatattgtcagatgagtcttttggcaatagttcccatttgcacgaccacttatgatttataaaggttctcagtttcctctttaccagccttcagttatgtcatacttttctttttgcacaatcgatgaaagttattgactgtccgttactgtcttaacttgcatttcgtaaatttttatgtaggacattttttaatgtttgttagctatgtacttttttatttatgtaaattacacattcaaatattttgtctatttatattgtaatctttttattattgattttaaataaattatttctgtatcttctttgccaatacttagagatataagtactatgaataccattttaaattaccaatatgaaaaaactcactatttttttttttttttttttttgagatggtgtctcgctctgtcacccaggctggagtgcagtggtgagatctcggctcactgcaagctccacctcccgggttcatgccattctcctgcctcagcctcccgagtagctgggactacaggtgtccaccaccatggccagctaattttttgtatttttagtagagacggggtttcaccgtgttagccaggatggtctcgatctcctgacctcatgatctgcccgcctcggcctcccaaagtgctgggattacaggtgtgagccactgcgcctggccaaaactcactgatttttaaaaaggcaaaaaacataaatatgtgtgtcacaaaataacatatatgaatagctaataagagcatgaaaaggtgttcatcattattagtcatcaggaaaattccaattaaaaccacactgaaatattactatctcaaaaaaattaaaaagacctaaaattaaacaaaaattaatcaagttttggaatgaattaagagccatggaaactctcatatactgttaatcagattgcaaattggtaaaactactttggaaaattgtttgacagttttaatcaagttaaacatgcacctactctatgacccagcaattctactcccaagtatgcccaagaaaaaatgagtggatgggtctacctaagccacatacacaaatattactaacagtgtgattcataatagctccaaactagaaacaacccagatatccatcagtgggagatgaataaataaattgatttttactcatataataaaatacagtcaataagagaaaaataggccctattgacaggtgtttacataaactcaaaaacattttgatgcataaaagaagccaggtacaaaagaacacatactatattattccttttacaaatagttcaagcatagtcagagtactggctacattagagtctggaggcttctgactgaggagcggcctgagggaaccttcagggatgctgaaaatattctgtatctcaacctggatagtgttaccaggttgccatacataggtaaaagtcttgtaactatacacttaagatttgtgaattttactaaatgtaaattatttctcaataaaataaatttttaaaagtaaattagaatatctaacactcaattttttaaaaatatgaattatgggggaagggtatttattttatttacaaggggaaataaatgctaacttgctttcctgtaatacagcaatgtgtgcttgataatgactgctggcattttgaagataatcgctacaggaattagaaagcataccttagtgtcaaaaggaaacaagaagaaaaagttcagaaagcaaagtaaaataaatagaaaatgtaaagaaaggtgaatggaataaaatcagtacttcagttgttatcttgggtgagaagagcctgaattctctgaaaagcagaaatgattatatttgttgacaaaacacagccttacattagtcacaagatataaaaaaatgagagcagaacattgcaagtaaatataaagaaaatcaaaaggagagagaagacaaaaagagacagtgtgtaatgttcaaaaggcacaatgtatgaagaaaacactgaccccacacttacatttggtaaacaacaaagcaaattacatatatatgcatacatatttatatgtgtataggtatatatgtgtaaatagatgtttatatgttctatgtaatctgcctttcaatttgcatatattttcatgtatgaaagaatatatgcacactttttaactatatgaaaatatttaaaaattgaaaagcagtaacattaaataaagctataagcttatattattgtcttttgaatttttgacagtatttaatgttttaatttatactaaatgaagctgaaatgcttatttttagggtattactatttcgtctaaatatcacattattacttgcttgataaaaatagttacaggaggccgggcgcggtggctcacgcctgtaatcccagcactttgggaggccgaggcaggcggatcacgaggtcgggagatcgagaccatcctggttaacacggtgaaaccccgtctctactaaaaatacaaaaaattagctgggcgcggtggcggacgcctgtgatcccagctacttgggaggctgaggcaggagaatggcgtgaacccaggaggcggagctttcagtgagtcgagatcgcgccactgcactccagcctgggcgaaaagtaagactctgtctcaaaaaaaaaaaaaaaaaaaaaaaaatagttacaggattattttgcaaaaatgactacaaggttattttacaaaaattctgtaactgagctatgataacaattttactattgtcacagagtaacctgcatttctcccataagcatctgaaagctaatgagagacgcctaatctacatccagggctcactgtgcccttccagcccccttgccagacacatgctaacaagaagatagcaagaaagatttgggttctggaaatagcttggaagattttgtgtcttgctctctgggtctgttttgctccaggagagaatgaacactttttgtttttgcaagttgtggctcttgtggattctaaagcttgatttttttagaggatgagagactccagggctaaggaagtggggagggctggggctggcatgatggtggaatttgtgtcccattcccagatagtagtctgtgaggcagcaagatttctaggactggcaagaacatgcctgggacactatcatgaagcttcaaattctatggggcagaatctagtggccccctgtggtcaaggctgcttgcagatgaacttggacatggcgccatcctcctcttcagcgtcactgcccagaccatgattgagattggcacttagggcatcagaatgtagtcaaaagagtgagaggaaataggaaaacatcaccaatcatggcttggagtcgaatacataaaatttagaaaaaagaaagatggttcttaattcctgcagtatttaggagtgaattcatacttgctacattatggttttagttatttatttacaagtgagtatgtgaccattatttttgcacatgtgcgcttttatatactattttcagtatgctaatataatatgatttgcagttttatcttggtgatttttgatcttgcatcatcaaattttccactcacattatcacatattaatttcaaatattctgtgtttaattaataatcaatttctggcttaagtaattgttttaccctgagagagaaaaaatttattaaaatgtaatagtaaaaacgcattaaatataaatacaaaattttgcataaagtatttctactctgatgaaacattctactttctcttgttattgcacagtcaactgggatttcacaatgggaagctgtgctaagccaatatgcctgtgttttacttgtatttaatagagcatgctgtacttgttctgcagacttgaacttacttacacaactttaagtaaatggacattcgcaggcctgaagtcacaaaaggtcagtgaagaacagcaacctttcacatccacagaacttttactcaaaatccagatacatagggaatctttgcagactcaggatacactttaattaacctgagacaggaggaaggctattatttagaagttgcataaaagtaagttactcgcaaagcataaagtaggacattggtattcctcagcgtatttggtgtattttaatatatgtggttttctttaacccttttaaaaggtgtttaaaacactttaaaagaagcatttgaagtagaaaactgagaagccagagatacctctacggaattctcaaatgtttagagaagttgacaatcaccaatctaaggaatcttttcaattctctgactccttgaatttatgttttgattgagtagcgattattcatattatcattattcagagcttcacaaaatagatctatagttgacctacttccaaactcaagcaacacataatccagcccatccttgtaaagtcagtcctcattctctgcagtctggtacagtgacaacaacctttttgggaaacacagtgcactagtgatactggatgaatccccgtgcatgtattaaataaaggcttcttaggagccatcacaatgagagggtaggacttcatttagtgtcctcaagtggttatttcctcatagaaaattactcgtggtgcttaaaaaataatgaattacaaataatgaatatgttggtaaacattttacaattcagagtataatctttcctcttacacagttattgtttggcagtgcagtttgaaggcaaaatccccaaagagacggtggaaaatacattaggagagcaccactttattattattattattattttgttttatttttttgagacggattctcactctgtcacccaggctggagtgcaacggcgtgatctcagctcactgcaacctccgctttccaggttcaagcaattctcctgcctcagcctcctgagtagctgggattacaggcgcctgccaccatgaccagctaattttttgtatttttagtagagacaaggtttcgccatattggccaggctggtctcaaactcttgacctcaggtgatccgcccacctcggcctcccaaaatgctgggattacaggcatgagccattgcgccaggccagagcacgactttccattttaaacagctttattgaggtaaaattgacatacagtaaactgcacatattgaaattcgatcagttttgacatatgtataaattcatgaaatcatcactagcaccaaggtaatgaacaatctgtctctcccaaaagtttctccatgtctcttggtaattcctccttttcaccctggatattgattttgtatcctgaaatcttgataaactcacttattatttctagtagcttttaaaaagttttgataaaatttttaaaatgcagtgttgaatagaaatggtgagagtaaatatccttgtcttttttctgatctcaggtgaaaagcctttagtctttaactattaagtgtgacgtgaggtgagttggagctttttgatagatgcccttaacctaacccttaacccatcattaggttaaggatgttcccttctatctctactttattgagagtttttatcatgactggatatacgattttgttaaatgttttcttctacatcaattcagtttgtcatatggttgtttttattacttagttttctaatatggtaacatacattgattttccaaagttaagccaaccttgcattcctaagataaaccttacttggtaatgacatgttattttttatatgttgatggccatccttatctttcttcttcttctatatgtaatatgtctttttcttctgactcttctaacgttttctttttatcactaattttgagtgatttgattataacatattctgatgtttacttcttggttattagacttgggttgtttgagctacccagatctgcaggttttcaccaaatttggaaaattttcagtcatatggcttaaacaatttttttctggctctccctttctcttctctttggccacttctctctcacacacacatagatataattaggtcacttgaagatgttccatagctcactgatactgtttttgttgctgttattctccttttctctctgtttcattttgcatcatttctactgctatgtattcaagtttactaatttttccttgtgtgtgtgtaatctgctgttgattctatccattgtaattttcttttcagacattataatttcatctttagatgtttcttcacacacatacactggtcaatatgcagcaaactcaagtggaaccgtctacttatttctcaaattctttttgtactcagctttcttctctctggtcctttgtcctgtaaactctaactacactgatctccaaagactctcatctctgtcttctcaactcagaaaatctactagtttcatcctgtgttgttcttccctgtagcatggactggaaaatctctggacaagtgggataatcataggactaaccttagttgttttctctctcttggagattactgtcctttgttgccagtttcttgaattcagtttcttgacttatgctttaaatattttgactattcttaaattgtttcaggtgatagcataaatctggtccttattattacatcttggccagaattaaaagtccaaatcattgagttttaatttttttttttgataggcaagttttggaaagatggccacactctgtgagatagtaaaacttcatggtaaacttagcattggagtaaatcattgtatactacaattatatagcaccaccatttgtgtttatgatataaaatatgtaaataaatatttatatttagtatataatgtgtgtaaataaatatttacacacacacacacacgtgtttgggagaataattgaaataaatgccccaaattctttacccactctactcctttgcaatgtgactttgcagctccttccaccaggaggtagggtctacttcctcgccatttgaatcagggctagtctttccatttgcttggccgacagaatatgacaaaacacgaccatttctacacctaaacctcaagaggatttataggattctgctgtctttaggaactgtgaacaagagtttgctggaagatcggaaagcacgtggagcagaaagtagtaaccccagctgagacctgcttagtgcagtgagtccccagctagacccccaccgaatatagatgcatgcatgaccctgggcatgtcagacaaccctagcaattggtcagagaattatgagccaattgatgatatttgttttaaatgattgtgttttggagtgtttcattatgcatataataatgtatgtttacaaatagacataaatgtgctagaccccaaacaaacattagccgtcattaaataggtatgtctgaaaaattagtgtagcttggccactctaattccttggattaaactctaaatctttaacgcagtagttaagtttcaccaccttgagtaaaatatttttaatgtaaaaatgacattagtaacacaaattaatgttcttttaaagtaatatgtaagaattttgagcatgatttatgatcatgcacactataggtacagtttgctgaaaaacaaattggatatatgaggatactgagagttaaaaagttacttaaacactattctcatttttcatagagatttatcattaaattcctgactttcaattgcaatttctttggtttaaaaaatatattcagtttttgttataaatatttcattttaagaagatgtaaaattcaatttgcacaaattgctggaaatctatttgttaaaaacctgcggtcactcaagggcaaaattgggaaacttttggcaaaactgaaatcatctggctgatagtgcatgctggattgtgcactggagtcctgccaatatgtccttcaaccatgggaagtctttccaaggagaatgaccctggaaatagcagagagtgagccttgtttgcacacctgacaagctggtgggttttctgtaaaaaggttggttcatcagatgtttcactgaacagaacaattggaggtgagccttttttttttgtaacagaaagctgtgcctgatcaattatttagtccttttagaaaataagaagtcgggaaagaatatgttaataagaggtagttacaaggtgcatgcctatacaacattcattgagatttaagattcatagactttactatgttattcccaaaaactgtttctaatagcagggagagtccaagagaatattgtgtggggatcttggaaagggatttgagtgttcacaagagcatccatcatatttttacctttcaaaaggcagtcatttagaagaataatgtcaaatagacattaggctcacaattagtaaggtgactaaaatgaagcaaggtttcttaaagttgaagaacataggtcagacacagaggctcctgactgtaatcccagcactttgggaggccaaggtgggaggattgattgaggccaggagtttgagaccagtctaggcaacatagcaaggtcctgtttcaacaaaaaatttaaaaattagctgggtgtggtggcacatgactgtagtcccagctactcaagaggctgaggtaggagtatcacctaaacccaggagtttaaaaccagcctgggcaacatagcaggaactcatctctaccaatttttttttaaattagccagctgtggtgtcacacaactgtagtctcagctattctagaggctgagacaagaggatcacttgggcccaggattcgaggctgcagtgaaccatgactgtgccactgcaccactccagcctcggcaacagagcaagaacctgtttctctctctctctaaaaaaaaaaaatgttgaaagacatgtataaactaacaagtggaagaattaataatgtatgtattaaatggtaacatcctaacttgttatctttataccagtaagcatataacagctgaaattatgaataaattcattctcataggaaatcattaaggagaatttgagattcaggaattactgcataatgtttaagggtgacaatatagagacagtcataatcttcaactgaacctcccctactgttatgatctgggaaagtcaatagcaagggccacgaaactatgccccacacgccaagtctgggatgctgcctgttttataaagaatatttattgcagcacagctaccctccattaatttagtattgtcttcggctgctttcacattactagagccatgttgagtggttgcgacagggaccacataaccaggaaagcttaaaatatttactatcttgtgctttatcaaaaaagtttgctgacccctggtctataagaatgattattcattatcactaccctcttgaattcttattgtacatacatagtaaaactgagagtattatgttcatttatggtttatgcacctatgtggggcaagcaggattacaaatatcttgtatctaagtcttacagcagttctgctctcttagcagtttaagcaaatataagttagagaaagtaaataaccaataactttccaagcccccatgactaagtggcgaaatctaaaccagaatccaaatctgtctcattccagcctctctgcggtacaccatggagtttcaaattcaaatttgccatgtgtaaaacctgagacccagagtagggtaaacatggatatctagttttagtgctaatcccaggtcatatgcaacaaagtggcaacagataggactgtgaaaggaagacttggggaaatgcaccaaaggtgagcacttctctgagtctcttgtcagagccatttgggttgtgtttctcctaaagggaactgatcaatcatccttaatcaatcatcctggtaatcaattatccacataaaaccattcactctctctttactttgtgtataaaatctgtaagaaataaaatcaaagtctcttttaatcttaaagttttgaaaagattaatccatgcctttgccttatgttttttatttttttctgcctacaagttgatagttttatattgtataacattcatttctccagttttctcttcctctgacgtaaaagtaagagtagcttgcgtgatattggcaagcatgaaattgtggaaagaaagggataagagtatagtttcattttttaaaaaatgccaatcttaggccctttgaaggatgatggaagggcaggcagagctttagaagtctttctaggccttctattctctcacagaagttgcctttggttcctctgtaggtatctaacagactgaacatcaacaaaatgctggtgtctcagtgcgtgattcttacacataattcaggaggaggacctcttaacattgcctatacaaaaccttattttattttctagataaaggaaataacatctaagttgcttttactattttgaaacactctaatgacctgagccctagccacaggaattcaaggtcttattaaataatttaagcttacaggaaagagcccagaccctcacctagagtgtgttgaactctgtccttgaaacagatggggttaatcttgggaaaagaataaaactttggagaggaagactaattaagaagaaaataaagattaatttcataggactcctgaaaaaaattaccataaccctcgtggctttgaaccacagaaattttttctcccatagttttgaaggccaggagtctgaaatcaaggtgtctgcagggacatgcttcccccagaaactcaagaggagagtctgttcctcgactcttccagcctctgttgatgtttcttggcttgaggccgtatcactccaatccctgcctttgttggtcacatttccttctcttccgtatattttctcctccgtgtgtttgtctcaaactccttctgactctcttataaggataaatgtgatcacattttaggcccacccagataataccggataaactattcctctaaaaagccttaatgtaatcacatcttctgcctggaaggtaatgtttactctcttgccatatgacatattcatcggttctggggattaggatgtggacatatctttttggaggcctccgtccagattttaaagaagagtgtatgagaatcttcccttctctaaaaatctaaatgtatttgtttggctctgactctagaactcggagaagactgaaatggttctggtgggtgtgggttgtaataatctcgtgtctgggcaagcagagctttcagatggagccgtgcttgcattcttggtgttacatagtctctgttgtgctcttctaacattatcttcaaacttcaggaaagccttgtttgaagttacagccctgcatctgtgtgttctgaggactcaggatagggcctgtgcccacacttgggccaaagagatgccgaaaatgctgtgtctcagacttttagaggtaacatcaaccaacgaaggtggctgatatccaagtatgagggttattctatgaaaagttataggaaaagagaaactgctggatggaagagtgaggagggccaggtgcaggaacatgaagtggttgcgtgcccatgatgtagtgttatggggaactctgtaaggcagctggggaacattttgagatgaaagtggagagtagtcacctccaaacagaagctcatcagtctggtggtttcaggctatgataatccccatgccttcctcataggctactgagttatgattcctaaagtaaatgtaatattgctatttggggatgaagttgtgatttcctgtacaagggaaattttatttttggttcacttcaactaaaatatgttgaatacatctaagtattaatactattattagaggacgaaggtttatgatttgaaataatgtagcttaatttttcacttatcggtgtgatttcatgtgtcacttgatcaactgtacacattccatttcctttgcagaaaaataaaaccattctaatttcacaataaagagcagtagtcctggagaacatgggcgaatcatgctggctattaatccagacccactgcaaggctgtcaaatgcaaaaattgaatggtaatgatacagggaaattgaaacagaaagaagccaaactccttttgtaaaattcaagaaagatgaaaaggcaatttgaatacagaattgaccctggtgaataatttggcaagatgtattggcttcctctaggcatggagtttacaggcagattaaattcaacaggcaagaaacagacaggaagtggatgcaaagcgagagacgatggggtcctttttaaaaatatcgccatgatgttttttttttttaagtttatatgtcataatggaataaatagtaatacaagttggcaatagaataggtcaatattttccatctccaaaaatgtcaccagcagttaggaaataatgtcagccacagatctcatgggcactactcatattgtaactagggattgaaggaatttgaaaatacattgcatattgtaaatctatgttgctgagttaactcaggagtattagtaatcctaaaagaagtacttatattaaatagtgtccaaatcaataagccgtggtgtgtaaatggagagagagtatctggagagagtaatgggagtaatgatgggagctgcattgcatgttctggatgttaagaaatatccttccataaccaccccttacattcagtgagagtaattcagaataacaagaaaagtttggattaaaaaggtgaaatttatggatcaactattatgtgccaggtatatgctcagcactatcagttatgatatttaatttactctttataacattagtaattagggatcattgttgtatatttttattgatgaagacataaaagaaatattaaaaccttaaacatagtcagacaaccagtaagtatacagtcacaatttcaatgtgagtctttctaaatttataggttttttaaaatagcatattacttgtaaaaccaatacaacatttactacttgaataagagtaagattttaactgaaaatggtggcttttaataaacattcttaaagtgccccctgaaaatttcttaaggtggtagaccaatgaaaacttccttacttaaaaattgtatcatatgtataaatatgtatattacatgcatactcataattttaattaaatatatgacttgatagattgtgcactatcgagacaaaataaaaatgtaaaaagtgagaaaaaatgatataaatattttaagcaattctgtttctatgttattttatatactactgtattatcatatataatttgttttattaatgagattgaatattctaattattttttaaaaccttaacacttgtaattggccttcagcacatagctttatttatataaatactttaaaaaatatatttgaagtatattgtacattaagaaaagtgaacaaatcatatgtctatatttcaatgaattattacaaagtgaatctgcaaagcaaaggatttccacattccataagctactattctgatcctaactgtaactccccaaaggaaatattttctatagtgtttttaacatttacataaacgacatcatacagcatgttctattttattttgtttatatttgtctgattcatccaaattgttcaaataatggtagttcattcattttcattgctaggccagtgctggatatatgaatataactcaaattatttatacattttaatattgataggcatttgccttgtttcaagtttggggatattacaagtaatgatgctataaccatcacccaggctggagtgcagtggcacaatcatggatcactgaagcctccacctcctgagctcaggcaatcctcccatcacagcttcccaggtagctgggaccacaggtgcacaatacctggctaattttttgtagagacgggattttgccatgttgcccaggctggtctcgaactcctgggctcaagtgatccacccacctcagcctcccaaagtgctgggattacaggtgtgagccatctcacccagacacatgtctgcatatctgttgagtatatacgtaggaatggaatcgctgggttatatggtaaatatatgcttaattttataagaaactgccactttccaaagtgggtttaccatttttcacttccaccagcaatgcatgacagatccattttctccatatatctgtcaacacttgacattgtcactcaaataattttaggcaatcttgtgtatgtgtaatgataggtatctcaatatgattttaatttgtatttccacgtaactaatgatgtcatgcactttttcatatgtcaagtggctctttggataacctctttgtgaaaaaaacattcaggaattttgttcatttttccattggattatttgctttttgctttgtaagaatatttctattctctgaatatatgacctttgcatatacaagatacttgattagcaaatggctttactcactctcttccttgccttttcgttattttaattgtgtgttttgatgcataagtttctaattttaattcacatttattcatctatttctttatggttggggctttttgttagaaacaaggcattctcctacattttgtcctagaaggcttgttgttttgttctatgatcatgatcagcctggaattgattttctatagatgatggtgagggaaaatttgtatttttccatatggatattcaattggccaaacaccagtaattgtaaaaaaaaaaaaaaattgtttacttactagtctatagtgtcacctttgtcataaatcaccggctgtcatgcatgagtctgtttttgaactctatattctgtttcatcagtctatttatgtattcttcagacaatcctactctgatttacttactgaggtttaatcttgataacaaatagtgtaaagccttcatattcagaaggctggtcttttaaattgctttgtttatttttatccctaatcacttgctcctcttcacatatagacaagaaaatgtggcaatccctaaagggacttcactagacctttagataaatttgaggagcattaacatcttaataaatgttgagttcaatacaagaaaatagtagatctctccatttttaaataatattttagtctgtttagatttttctatgcagagatttttaaaatatttcattaggtttttaataggtgcttgttttgtgctgttataattggtattcttttttgaagtagcatcattgtctggtgcacctgattttatagacaggtttgaggaggcaatgtctaatttatgtagggcccacagattggttggaccaggtgtgatatttacatagcatgaggagaaggctggccaccccactctaatcttattatgcaaataggttttccatttagccagtgccatgttgtctgctctttactgtacacctgtctggtgaagagaagggaacatagagccgccattttgaacatgcctagctccagatagccttttcctattggcacagctgccagcattcacccgtgcaagcttccaacttgcttgtctatgtctgcagctcgactttacaggctgctctttgttagaaaagaaaatgatttgggggctgcttttcattaaaaggaaaatcttatcgaggactttcttaccctcacaatatgcctaaataatttctacttaattcccatatcattttaactattgaagttacagtgtttatgagggctttggtaaaatacctgtgtttttagataaaaacaacaatgaaaaataagctacaggaataaaaacttaaacataccaaaggtgtgaatggtattcacaacatcaagtgtatgatatcttacctcatggggaggaagctaacttggcaggaattttgcagagtcttcaatgcctaagtgaaagttatcaattacaagtaatcattttctaattgtttcttgattgactataggactgaaattatactctaaattgatctagcattcagtggccttgttatatccactttttaatacaaatagtctatctataaattactttggattttctgtgtacacaaccctttcatctgcaaatgacaatgttatttattctttccaattatttcacctttttgttttattttttattttttcctgagtcttgctctgttgcccaggctggagtgctggagtgcagtggcaccatctcagctcactgcaacctctgcctcccaggtctgagtaactctcctgcctcagcctcctgagtagctgagattacaggtgcatgccaccacgcccggctaatttttgtatttttagtaaagacgggatttcaccatgttggtcaggctggtctctaactcctgacctcatgatccacctgccttggcctcccaaagtgctgggattacagatgtgagccaccacacccaaccactgttttattctttcttactgtactgactagatctccagtgcaatgatgattggaaattactatagctgctatcttggtttcatcctacatatcacagagaacggttgtttagaaactctttatccaattaaggaagtttcccttctagtcctagttgtttatgagttttgttgctttgctgttgattttagagacagtctttctctactacccaagctgtagtgcagtagcactataatagctcactgcaagctcaaacttcagggctcaaatgttcctcttactttcatgcgcgtccatgtgaaaagaccaccaaacaggctttgtgtgagcaacatggctgtttatttcacctgggtgcaggcgggctgagtccaaaaagagagtcagcaaagggagataggggtggggccgttttataggatttgggaaggtaatggaaaattacagtcaaagggggttgttctctggtgggcaggggcgggggtcacaaggtgctcagttggggagcttctgagccaggagaaggaaattcgcagggttaatcactcagttaaggtggggcaggaacaaatcaccatggtggaatgtcatcagttgaggcggggcagggccttttcacttcttttgtgattcttcagttacttcaggccatctgggtgtatacgtgcaagtcacaggggatgcgatggcttggcttgggctcagaggcctgacattcctgccttcttatattaataagaaaaataaaacaaaatggtgttgacgtgttgcggcggcgaaaatttttggtgggtgatatggagagaagagaatgggaaatgtttctcagcgctgcttcaagcgggattaggggcagcatgggaacctagagtgggagagattaagctgaagggaggtcttgtggcaaggggtgatattgtggggatgttagaagaaacatttgtcgtatacaatgattggtgatggcctggatacggttttggatgaattgagaaactaaatggaaaaacagaagaagaaaaaccggtataaaaggtctaagaattgggacgactcaggatatctgattagagagtgcctaaggagattcagcatagttctgccagcaaagattatttatttacttcaagagttaagagtggcagtttggggatagcaccaggagatatcagctgtgatggcttggaaaaacagtgtaaactggcagtgtaaacaagagcagggcatgtatgagtagttgagaatggtgaataggagtatgactagacagaagatagtagggatgacaagtttttttgggggcacagtctaagttggtctggtgtctggaatgagactggggcctaataaaaaggagcgtctatacaggagctcaaatgggctataccctgtagcattccgaggacagccctaaattctgagaagggaaagtggtaaaagtattgtccagtcctttttaagttggtggctgagcatggtgaggtgtgtttttaaaagacctttagtccgttctacttttcttgaagacggaggaccgtaagggatgtaaaggtttcactgaatactaagagcctgaaaaactgcttggctgatttgactaataaaggctggtctgttatcagactgtattgaggtgggaaggctaaactgaggaattatgtctgacagaagggaataaatgactgcggtggccttctcagaccctgtaggaaaggcctctacctatccagtgaaagtatctacctagactaagaggtattttagttatcagactcagggcatgttgagtaaagctaatttgccagtcctgggtgggggcaaatcctcgagcttgatgtgtagggaagggagggggcctgaataatccctgaggagtagtagaatagcagatggaacactgagaagttacttccttgaggatagatttccaggatggaaaggaaatgagaggttctaagaggcgggctagtggcttgtattatagcataacctgcctttgctggtgtgtggcgattaggcctggtggaaccgccatcaataaatcaagggtgatcagggtgaggaacaggaaagaaggaaatttggggaaatggggtgaatgtcaggtggatcagagatacagtcatgggggtcaggtgtggtatcaggaataatgtgggaggccggattgaagtctgggccaggaacaacggtaattgtgggagactcaacaaagagtgagtatagctgaaggagccgggaagcagaaagtacatgcatcaggtatgaggagaaaatagattttggaagttatgagaactgtagagagtgagttgagcatagtttgtgattttgagggcctctaaaagtattaatgcagtggcagccactgcacgcagacatgagggctaggctaaaacagtaaggtcaagttgtttggacagaaaggctacagggtgtggtcctggctcttgtgtaagaattctgaccacgctaaccatgcctaggaaggaaaggagttgttgttttatagaaggtactggggtttgagagatcagtcagacacgattggcagggagagcacgtgtgtttttatgagaattatgccgagataggtaacagatgaggaagaaatttgggcttgattgaagtaatgggggctgtctgtgaagctttgtggcagtacagcctaggtaatttgctgagcttgatgggtgtcagggtcagtccaagtgaaagtgaagagaggctgggattaagggtgcaaaggaatagtaaagaaagcatgtttgagatctagaacagaataatgggttatagaggcaggtattgaggataggagagtatatgggtttggcaccacggggtggataggcaaaacaatttggtcgataaggcgcagatcctgaactaacttgtaaggcttgtctggttttaggacaggtaaaatgggggaattgtaaggagagtttataggctttaaaaggccatgctgtagcaggcgagtgataacaggctttaatctttttaaagcgtgctacgggatgggatattggcattggggggtaagggtgattaggttttaatgagatggtaaggggtgcatgatcggttgccaaggagggagtagaggtatcctatacttgtgggttaaggtggggtgttacaagaggaggatgcaaaggaggctttggattgggaagaagggcagcaatgagatatagctgtagtccaggaatagtcagggaagcagataatttagttaaagtgtctcagcctaataagggaactgggcaggtggggataactaaaaaggagtgcttaaaagagtattgtctaagttggcaccagagttggggagttttaagaggtttagaagccttgccgtcaatacccacaacagttatggaggcaagggaaacaggtccttgaaaagaaggtaatgtggagtgtgtagcctccgtattgattaagaaggggacgggcttaccttccactgtgagagttacccgaagctcggcgtccgtgatggtctagtgggcttccgaggcgatcgggcagtgtcagtcttcagccgctaagctgagaagatctgggaaggagtcagtcagagagccttgggccagagttccaggggctctgggagtggctgccaggtgagttgaacagtccgattttcagtggggtccgacacagatgggacgcggcttaggaggaatcctgggctgctggcattccttggcccaatggccagatttctggcatgtgtagcaagctcctgtgggaggaggttctggaggaacgcctggccactgcggttcaggtgtttggaagttcttgtgtgctagagatgtggctggggtttgtctcacagtggaggcaaggaattgcaacttttttctattattgtacaccttgaaggcgaggttaattaaatcctgttgtggggtttgagggccggaatttaatttttggagttttatttaatgtcaggagcagattgggtaataaaatgtattttgagaataagacagccttttgactttttagggtctagggctgtaaagtgtctcagggttgctgccaaacaagtcatgaactgggctggatttttatatttgatgaaaaagagcctaaacgctatctgatttgggataaagaaaaaggagcattaaccttgactatgcctttggctccagccacctttttaagagtaaattgctgggcaggtgggggagggctagtcacggaatgaaactgtaagctggaccagggttgtgaggaggggaggtgataaaaagattatagggtggaggaggagaggctgaggaagaattgggacctagctcggcctggccaagaggggagaggtcagacgggtctgtagaaaaggaagattagaaagactcagtgacgcttggggttggtactgaggggacaggtgggagggaaagaaggaagatttgggatgagttgcactggacacagagactaggaagggactcatgtgtaaaagaatgcctggacgtcaggcacctcagaccgtttgcctattttacgacaagaattatttagatcttgcaggatggaaaaattcaaagtgccattttctggctatttggaactactgtcgagtttgtattggggtcaagcagcattgcagaagaaaataaggcatttaggttttaggtcaggtgtgagttgaagaggttttaagtttttgagaacacaggccaagggagtagaaggaggaatggagggtggaaggttgcctatagtgaaggaagcaagcctagagaaaagagagagtatagaaacggagggaaggggttcgggggttcttaccttccagaaaagtgggaaaaggggttggggtgcagagataagaggtcggggggcagaaataagggatggggcacagaagtaaggggtcggggcatggaaataagggattggggcacagagatatgaggttcgggtgtggaaataagggattgggggttcttgccccctagaaaagcaggacttgccactaagggtgaaggagaaggggttgaggggtacttgccactcccccagaaaagtgggacttgccgctaagggtgaaggaccaaggcaggcgtccctgcgtggtctgacacctttgaaatgtgggtgaattatcagagaggcatccctgcaatgattaaacaccaagggaaggctgccttcccagtccgtaactggcaccggagttttgggtccacggacaaaacgtgtctcctttgtctctaccagaaaatgaaaggaattgaaattaagggagagattgaagtgtggcgccaagattgaaaggagaaagaggttgagggatagtgagggaggttggagaagagagtaaaaagaggccgcttaccggatttgaaattggtgagatgtttcttgggctggtcagtctcaggacctgaggtcgtaggtggatctttctcacggagcaaagagcaggaggatgggggattgatctcccaagggaggtcccctgatccgagtcacggcaccaaatttcatacacgtccgtgtgaagagaccaccaaacaggctttgtgtgagcaacatggctgtttatttcacctgggtgcaggcgggctgagtccaaaaagagagtcagcaaagggagataggggtggggccattttataggatttgggaaggtaatggaaaattacagtcaaagggggttgttctctggtgggcaggggcgggggtcacaaggtgctcagttggggagcttctgagccaggagaaggaaattcgcagggttaatcactcagttaaggtggggcaggaacaaatcaccatggtggaatgtcatcagttgaggcggggcagggccttttcacttcttttgtgattcttcagttacatcaggccatctgggcgtatacgtgcaagtcacaggggatgcgatggcttggcttgggctcagaggcctgacacttacctcagcatcccatgtggctgggactataggcgtgtgccaccatgccttgctatttttttttatgttttatagcgatggggtcttgctatgttgcccatactggtctcgaactcctggcctcaagtgatcctccctcctcagtctctcaaagtgctgagattacaggcatgagccactgtgcccagcagctatgagtttttattgtgaatattgagttttattaaatgctgtgtcagcatctttagagatgatctagtctttattctttgtggtgaatcacattgagctttgaatttataccactcatgaattcttagagccacctctactttgtcaggctgtccctttattctactactgtaatttcagggctttgattattattttgctttggtttgcatcaatgttcctgagaaaaatggacctataattttcttctcttttaacgtcctcattaggtgttagtatcaagattatactggctgtataaaaagaggcccagtgagttttctctttttctattatctcgaataacttttgtaagatcggtcttatttttttcttaaacatttggtagaaatcacaagtgaagcaatttgaagtctaaagtttttcattttttgatttgtttgtgtgtatatgtgaaaagattctttcatggataacttttagataactatcataatcattaaattttctatttttttcttgtatcagatttggtaagatttattttttcaggagtttatcaattgtttctttttttttccagaaagtttttcataatattctcctaatgttcatttgcatttactgaccatggttttcatcctgcatgttggtgctttatgcctctttgtttcttgatgtgtcttgccagaggtttaagtaatttcatcagcttttccaaaaaagcaacttttggctgtgttcatcttctggatcttatatttacttttcatttcattaattttgtccccaatctttattatcatcttccattttttttacttaatttgctattattttctaactgatggagatgaatacctgatcattaattttcagttttttcttctcttctgtggacatgtggctatcaagttccctgtaatcatcgactgagttatattccatacattttgatttttctcattttcattattattcatttcaaactacttcctgttttcatttacccatgggtaatttaaaagtatagaaattttcacacacacacaaattttcttttcttgtctttttttttttttggttattgattttgagctgaattctactctgactaaaaaacatactcaatgctgtgaatttcacaggattgtaaaatttcaatcctgtgaattaaatttgtttagacttgtcaagcatatcatcaactttggtaaatgttttttatacatttaaaaataatattaaggtgatgttagatacaatattgtaaaaatgccaattaggtcaaatttattattcatatcatttacttttgctatagacttcctaaatttgtccacttatttaattatatactacagaattgtaataaaatcttctgcaagtagtgtgtattagtctatttttttcatttacttctattatattgagttttatacattttgaagctgtattattaggtaccatgttacctctcattcgttacaaagttttgtgaatatgatgctttgactttttcagagaatataattcataaatcagtgcaaccagaaactgcaacatgtcacattgtaatgaatgtttacaagtaaatagagaagccaaagtcagcctagctgaacctcagtctcccactttttcctcacaagctaaatgaacatctgatccactcttctgcaccaagatctcgaccaaaacaaaacttcagcttcaatcagtattttaattgaggaattagtatttagaattttatattttcttgtttaaaaaattggtatcattatacaaagaacctctctaactttaaccttgattgctatctttttgactcattttagtctaattattttagatttattttgtttaatgtttgccttatatctttttcccacatcttatatatcttttgttgtattgaagtggaacattactaaagggcatggaaataataaaacctcagtgcaggaaatataccctagcttcagtggaaaataatccaagaactagaaaactgctgggattgacaatcttccctgccggggctcctatttcttcatttctgctttgttttgcccactatttctataattccttctttcaacttttttgtcctgtttggagtgtgggagacctgaatgtgccaccccaaaatataccctttaccatgaggattgccaatctgaaagcaaataagaagcacttgtaggaaagttctctgtctaccctctatttgcataatatcaggacataaacttacaaagaaaaaagataccccacctcccttttctacgagggagagcaaaagttaactgcttaagacaactgtagacccttatgcgtgtggagttggcaccaaaagcatctacataaataaaccttactgaccagcatttagctgccattatttgccttcccataagttgttgcccttagagactcaaggtccttttccttttacttgtcacctctctaaaaatgtactgttcattgtcaaagatggtatatcagctggaagtcaaagccacctcttcgagaattacttcttctctggatacctcttatacgcctatacatgttaatatacatgttaataagcatctatttgcttttctcttgataatttgtcttttgctacagagtttcttttgcaaccaagaacttatgaggattgagcttacaatagcctagcatggcttccatgcccctctctcatcagctggctctggcttttcgtatctccttttttctaggctctgtgttgatttagcatgtctcttttaagccacgtgtttaatattagctttcaggtcaagtaacgacaaacatcttcaatatgatacatggacaatggtagataggaaaatcatttctgcagtaggcaatgagaaatgcctcatcaactgcagtgatcattcaatctacaactcttctttgcaaaagggtataacgaaaggctaaacctgatcgctaacttcaaaatgtctttttaatttaaacatttaattataaattagaaaatattgcatacaaatctcaaatgccagcttctcttgaaagttcagaaatctggcagcagtaaaataacattcttacatagaaacaatggctgtgcttaacaatgctggtttcttcctttatagattgggcctgggatctgcaccattgcccctgacccaattttttttttttttataaagttgtcctgaatgcttttcagtttgtgatccttgaaaaaatctgacagtaaactcttaatgctttgagggaaagtactttatcttaattatctttaaatcacaacatgctgcagaatgtttggatcacatttgatgactaaagtgatgtcagtgaaatagttaaagctttcaaaaattatcagtatttacacctatctcttgattgttagtaagaaagtggatttattttaattaatgcctgaaatccatagatgtcataaacacttcaattcatccaataatttcttcttaaatcaaactttcaaaaaataattggaggtgctaacaagtagcaaatctgactgtgaatggaattggctttcttttgtttagtggaggaagataattagcaggaaatggccaacagatgatgagcagaaagaggaagctggggacacaaaagatctctcacaagaaaccaaagacctcagatccctaagaattgatttcactgcaaatctcaataattgctggaaagagtttcctgggacagcagttaaagcaagtcacacatattaaaagacatgctttgtttgtaatattggaagaattgaaaatcataccgatttttatgagtaagcaccttgataatcaatgaagaacatctggcaatttaaagctttttttaaagtccttgaatttgttatttcatggagcctcagtccctcaacttagctagacacaaacaagacatctgtgtccaaaagtttaacttccactctctttgttggatgaaccagaaagcaaatgctccttcagaacagtctgacctcagaaggctctagaacatccggaatctgggaagggctaacaggatttatatgtactgataggaaaggaccactcagcacctggtgataacaccatattcaatccagggaaattaaattctaacaggattaaaggagtcagcagttaatacataggagtatgatttcccccaagccaacatgcacattgaaagcccatcttctatgggagaaactgctaagaacatgacacaatgcattaaggtaggaggcagcttaaaatatgtgcagaaattctagcttttcattctgctatagcaacacagaatacgtctgaattgcctcatatttattgccctgttttctaacagcaaatgcaaaaacatgcatcaatatagcactatggaaccaacctaaataaactaaagttatataggaaatttatttatcatgtgactatcacacacacacatacacacaataaaaattaccaaagaattgtcccgaaatataaaatatggaaatctcaaatacattttattatttcaaatcaagactctttagtactctgttattgtgcctcggaaatctaactgttccctatccgtgtttccgtacttcttaatttgcaattttgacaaaattcaaaggagattcccatagcttatgcaattcaaggagcagcacttccctaacagcagttacaagggacctgtcttgttcccaaaagcatcgtctatccctgagaagaagtatgccacttctttataagtactgccacttagctggcttcctgtcataagttcaatgttagaaaaaggactctgcttctccttggttgctcctttctctttgttaaaactgattccaagcaattagaagctccagctattcaaaaagcaagcaaagattggtgccaaagggcaagcttgtccttgagagaggtcatgcctcttcagctgaagcttgtctttgcttggggacaacggttccctgtccaccccatctttaagaggcttattgttatgttcatacccacatttctcagtcagggaaagatattggtctctgtggtagattgatttaatggccccaatacttgagccctactagtattgtcaccctcttccctgtagcattctagtgcctgcttagtctggctttaagcccaattatacaatttcttttggcctatgggatattagcaagcatgatggaaagacaggctggaagagtgttacatattgggtttgttcaccttgctctctctataatgtctatgtgaagatgcctaggccagcctgccagaggatgaaagacatgtagagtacagtcgagtcagcccagcaagatgatcttaaatcagccaatagccaatgacaatcatgtgatgagcccaactgtaaaagatcagtcacctcttttacaatcgacagccatgaagcctttgttctcttttgataatcttttaatttcctccaagggcctagtccttcggaaccataactatggcttgaacaattttcctaataagaaaaaatatatgcctgtgtgtgttgggtgcatctctcaaagtttctagttacacctgggcactttctttgctaaattgctaaatgccataaaataacatggttcagtaattagatatttgtcttgcttagataaatccctgatacgacatattgttaaatctgtcattataagatttgagccatttttgtttccctttggaaaatttttattcataaaaattgagatgacccaaaaaatacttctttgacttttaggactgtgtccaaacatgttattctaaaagaagcagggtggagataaataaacttctttgaaagtggctaattcatctttatggtaataattaattgtgtgacagaatccaatccattaattttataagctagcatactctgtgccttcacttatattaaatttttaaaacagttgtagctgaaagtttaaaaattcattgatgattttaagttattgaattatggtcagattgtattaaaacaaatccattttcatgctttttataagaggtacacctaaaatatgagagcatggaacatgtgaatgtaaagatatgagaaaaattttacatggcaaattttaactaaaataagtacggtataaatgtattcaaatgaatcaaaaagacaaaacaacaaggccagggttggaaagggtctttgtatagttatgaaaagcttaaaacaggaaaataataaaattctaatctttcatgcacctaatgaaaagcctctataaaaatatgtttctgaaagattaaagactttaatgtaaaatgcaaacaaatatttagaacaatatcttcataactttggagaaggaagactcttatatatgtcacaatgtgctaaaatgaaaaaaatcagatggataattttgactaaatgaaaattaagaacttacggttatcaaagatatcataaggaaaatgaaaagacacaaagtggaagaagatatttgcaacctatgtcatatctggtccattaatcaaaggacagcacaataaattataatatatttacaaaatagaatactggactgtactgaaaatgaatggggtctggttcttgcaacaagtgaataaatgtaaaaataagaattgtgttgagtaaagaaagcgaatagaacaaatactatgtacagtataatacccttttaataaactcaaaactaaacaattcattgtttagaactgtatataactaggagagaaactaattttgaaatatcagggaacgataaaaataaaatttagaacaatgtttgctccaaggattgagggaagaaggaacagagagaaaggagagacagagaatatagaagacttaaccagcactaagtttcgatattatggataatacttttggctcatatttttatcctacctgcttccataaaatgataaggaaggataagttggattagatgcattcttggcatttactattctaaatgtattttccatcttgaagttactgttcgtgaagccaggagcaattactttttgagtggatgcactgtcaccacctttcaaggtgtcattgtcctgcctttcttcagaactacttgagccagctagagctttacatgccaagcattacaaaataaatagagaattggaattctttccatctgtaaagcaagaaaatgcacatttgaattccgactaaagggacacacccctttttttgagaaaagcacctattgcaaggttttggtgttggtgcaaacactcattttgatgtctttcacttcttataagttattggccttcttttctaaaatatctcctacctttccaactaaggtttctcctattcagaaacaatggcttaatcattttccaaaggactcttttcttcatagcagtcttgatagccacctaccagaagcctgatttaataggtcttcggtggatccatttcacccatgagaacaatcagtaaggactggtggcttctcagccaggtgttttttgagtgtgtgggtgcctgagtggtgccatacaaaacaactctgattcatttgtccacagagaactcaagtgacattttgggtaattcatttgtttagagatgtgtcctttctacccaccttcatcttgacccaagtgtttagctttaaggctatttttggacatatgacactaaaaaggatattaactgctcctgagaatgtgacactcctagtgagtctcaaattggaaacaggcttcaatgcatcagccatttttcataagtatttaatagcttcaaggaaatgacagttccacgtcccacgtgggttttagttagggtgtaaggttcacaactgaatacatgggagacaattgttgaaccatacattatgcaaactgttgtgaaagttaaggatacacaactggcctactttatacatatgcacatgaaatactacccctaccccttaatctatttaaaatatgttcctagactttaaattcctcaggccttagggaaataaaaccaaggccatagctatataattgcaaagctccaactgtgtcctattaacccagtcatttcatgaactaattcagggacaatgggttcacaaagcctcagtgtgtttaagatttataattaaatttcaaaaatgaaagctcatcttgcctgtttaagaatctatgaagtgtgtggctatcctacagaatcttgtagacagactctgtttcttaaatccagccttttctttttattatgatgccagtttgtattttaaaatatgccatttctttctaaaaagtccagcttaaaactcaagatattaaataacaaaccctgacagaacatgtgagaaagtttcatacttttttttcaatttgcctgaaaaaaaaaaaaagctaaaaatacagacaatttctatctatgaatatcaacgattttaaaatgcccaccagagaacattgtttctaagtctggagtaaggaagagataagagattgtcctagtccaggtcttttaagaaactgattaaacacaaagggagcgtttcgtgggatattccgctgagaaaaaatgcggaaggaactgagaaaaggtgggagagctgtcggactgcagtgtgtatttaatgagaagagaaagctggaataaaggaagttgggacaaaaacattagagcactttgcagtctaaggaagtttctgcaaagccattcagtgttcttgagctaaagtctgtcatcagaggagccccctgtctctcagattggacccaccttagcatgatccatgatgtgctcactcattggctgagaacagcctgtgggaggtgtggcctcaatggaaacttaactatgagttacagagctcagtgactagagctctgtaatttcaacttaaatgtcttcacatactataaacaagacacagaataatttggatgatatttaaagaagatgatttccttattagtcagcttgctactgtaaaatgctgcataacaacccccaaatctcagttgaatccaaaaaccagtatgtatttcttgttcatgggtctccaggtgtcttggctaagctcaggtttgtgccagtttcatatgtgtgttattctaggacccagactgaagaggaaaaggctacataggacatgcacttatcctggcagatgaaaacaaaatgaaaaagaacaaaccaaaccacataaacacatttaaaacttttgctcacatcacatgtggtcacataccattaccaaagtaagtcacatggtccagccaaaagtcaatggagcgaagaagtgtagtctacatgctgggctagaaaattctgcacagccagtggtaaaggatgtgggttgtatagtcctagtatgttgagggagtggaggagtgaaaataattttctattttaaactaatattgctttcttgttaaacaacatgcaatagtaaaaaatagtcgtagaacacacacacatacacacacacacacacacacacccttgtgaatggacatacagatacgctagaagaatataaatatacctatctcatgtggagtcatatacctaaatcttggatataaataaaccagaaaagctgctaaattttttctatttttctttggtcattcagaatagaagaagaagacagaaatagtctatgaaaaagcatgacttatactagtaatggatgcaagaaatcttagtgcaagtgagaaaaaatgcatagatccacaaaatcaaaaagttttcacagcaacgttttcacatcaaagtgactggcctttttgatgcacaattttaaagcccacaagactggccacttccatcctgttggcatggacacaatataggaattaaaaaaaaaaagactggagtaaaaaaccaaacattttcttacagcagctgccccaaatcaactctaaatatcagccaactgaggcagctaaaaactcaccaaaaaataaataaataaataaaaataaacaatgcaaagactttgagtctttgttgaaaaagttgagggtggggattcagatattaattaggtaaaaagggaagaagttaaggaaagtctatttcagtatgtggaagcaaatagaagactccatggaataatctctggtataagccaataggaataaacaacatgggacccaagaaggaaaaaaagtgatggctctgagtttattccaccacctcacatacacacatactcacacaaggaaacaatgtagcacacacatgaaaagatgaagaatggatcctgaagaaaaatctaccccaggaaacaaaagaaaacttagtgatcacaatgaaaaaacaagtaaacagagccagcagaactaagaaaaaatattgaaggaaaaataacctgagtgagacccttaagatatgttaaaaataataacttagagaataggcttgataaaatcaccaagatgcagaggaaaaggacataaaaattaaaataatttgagataaatgtaatgaaataaaaataaaacagatacaaagactatgatactatagaagcagcagaaatctcctcagatgaaagaagaataaaagcccaggaccttttaaatgttttcaagggcttgttttatttcataaaaaaatgaatagagaatcaccgataatgagatatacttcattaaatttactaaatgtcaagcattcagaagagataaacagattaatctttacatattttgaaattgttttatagctcttggatgttctaagttttttccacttttaatttcctctttatatttcggcttgcaaagtttccattgacatatcttcaaactcattgattctttccttggcaaagttgagtccatggtaagctctttgaaaacacatttcttcccaccccccacttcaagaaggtggattagaggcctttagctttcctcagccacttggaaatagcaaaatagtacataaagatgaactctgtgagctttaattcaagaagaaaaatgggaatctaccagaatagtaaaggacaccgcagatcccggggaagagaagtgggcaaacagccacctaggggactcacctttccactgcagatccatgcaacccaggccaagggagagcacattatttcttccaagtccctggagctaacttggatggaggcttggagacacagagagggaaagacgtcgggaaaagctgcgatcattttcccagacccaggttggagacgaggatgccatttttaatccaggctcatacaaagtcagtcattctttggcaatttggcaacacggcctcacagtcattttagtgtcaggccagagattgaagcacttgctctagagtagtatagagcttccacagctggaattgagcagcaggggtggaaagcaccccagcagtaggtgctagaattgtgctttcccccattgcaggtctggagtgggaggagagttgctgtagctgtgggttctttgggcaatgagatcttcagacaaggccaacttggcaacctagagccaatctgcatgtgtcattatgaggtgccccagcctgctccctagagattgtggtgtagtggggcactctctgctccatggccaggtagatttccaggcattctgagtgtctgttcacctggataagctgccgaagccaccccacccttcttgtgaagagattgtggtgcagtggggctctttctgttccatacccaggcagctctctaggcacttggagcattcactctcctagatgggagagttaggccactcacccttcttcatgctgggaaactggggaaaaggaggtttctcagcttcatgtctaggcacacctctaggcgcttggtggctgcccagtgagcttgtccttggagctagtgcttgtgcctgatattgtgggacctgtaggtgtgcctgcttgatctggccccacccatcttgctcccactctccagggctgtgcattccacagtggtctgagctcccagagagttttaaccaggaagcaaggatcaagtatatacccatccacattggctgtagccagctcttacccacaagagccacctactggcttggagaaataatggcacagcactctaggatttctgccgacacaagtacataacactggagaaagttaaacttcctgaccactgccaatttggccccacaggaggcagtgagcctgctcacatgcccagaacatcactactataaccagcatttggataaaccatcataaaaaggctacctataaccaaggaatttatacagacactttgacactgaaaatacccagaaccggagctctaacccttagcacagttcacccgtaagggatggggaagagcagctgaccaaaggccaccttgggtaaaaggcaatgtgggcgtggcactagtcactgaaggcagcaccatcacagctcaggagcagacatggaaaggaggtcatctcatcccccattccaccctcctcagtgcactgttgaagactcagtagtagctcttcccatcagggctcggaagcatgggctgaaagagatcaattctaagcattctatagtggttccacctccactgaaggtgaatgtatacttgaggaaaatgcttttcatacttctttattgcctctgcttctgcacctacctgccagctcttactcttaaatgccaactactggactgcagcttgaactgcaccaccaaacaaaattacattgctactacaagcaacatctgagaaagccattgcatgaaactgcctgcagccaaggagtccatacagagcgttggcaccctgaaagcacccagaaactaagccaattagtcatgtttaatatacaccacagttgtatctacaagggaagaaagagcaaaaaatcaagaagtcccatccaaacaaaagtaaaattaaaaaaaaaaaggaaacatgagctctctcagatgagaaggaatcagtgcaagaacgctggcaattaaaaaagccagagtgtttcattaccaccaaaagatcccattagcttccaagcaatggaacctaaccagaatgaaatgtctgaaatggcagacacagaattcagaatttgaatggcaaagaaactcaatgagatccaagaggaagttcaaatccaacacaaagaaaacagaaaaatgatacgagtattgaaagacaacacagttattaataaaaaaccaaacataacttctggaattaaaaaatttccccattaactacaagtgcttcaaaatacagttggaagccttaacaacagattagaccaagtagaagaaagaatttcacagcttgaagactagttcctcaaattaaccaagtcaaaagaaataaagaaaaaaataatgtaaaaaataaagcctttacaaaatatgagattatgtaaagggactacatatatgatttattggcatcattttttttattattattatactttaagttttagggtacatgtgcacaatgtgcaggttagttacacgtatacatgtgccatgctggtgtgctgcacccgttaactcgtcatttaacattaggtatatctcctaatgctatccctcccccttccccccaccccacaacaatctccagagtgtgatgttccccttcctgtgtccatgtgttgttctcattgttcaattcccacctatgagtgggaatatgcggtgtttggttttttgttcttgcgatagtttactgagaatggtgatttccagtttcatccatgtccctacaaaggacatgaactcatcattttttatggctgcatagtattccatggtgtatatgtgccacattttcttaatccagtctatcattgttggacatttgggttggttccaagtctttgctattgtgaatagtgccgcaataaacatacgtgtgcatgtgtctttatagcagcatgattatagtcctttgggtatatacccagtaatgggatggctaggtcaaaaggtatttctagttctagatccctgaggaattgccatactgacttccacaatggttgaactagtttacagtcccaccaacagtgtaaaagtgttcctatttctccacatcctctccagcacctgttgtttcctgactttttaatgattgccattctaactggtgtgagatgatatctcattgtggttttgatttgcatttctctgatggccagtgatggtaagcattttttcatgtgttttttggctgcaaaaatgtcttcttttgagaagtgtctgttcatgtccttcgcccaatttttgatggggttgtttgttttttccttgtaaatttgtttgagtttattgtagattctggatattagccctttgtcagatgagtatgttgtgaaaattttctcccattttgtaggttgcctgttcactctgatggtagtttcttttgctgtgcagaagctcttgagtttaatttgatcccatttgtcaattttggcttttgttgccattgcttttggtgttttagacatgaagtccttgcccatgcctatgtcctgaatggtaatgcctaggttttcttctagggtttttatggttttaggtctaatatttaagtctttaatccatcttgaattaatttttgtaaaaggtgtaaggaagggatccagtttcagctttctacatatggctagccagttttcccagcaccatttattaaatagggaatcctttccccattgctcgtttttctcaggtttgtcaaagatcagatagttgtagatatgcggcgttatttctgagggctctgttctgttccattgatctatatctctgttttggtaccagtaccatgctgttttggttactgtagccttgtagtatagtttgaagtcaggtagtgtgatgcctccagctttgttcttttgccttaggattgacttggcgatgggggcacttttttggttccatatgaactttaaagtagttttttccaattctgtgaagaaaggcattggtagcttgatggggatggcattgaatctataaattaccttgagcagtatggccattttcaggatattgattcttcctacccatgagcatggaatgttcttccatttgtttgtatcctcttttatttcattgagcagtggtttgtagttctccttgaagaggtccttcacatcccttgtaagttggattcctaggtattttattctctttgaagcagttgtgaatgggagttcactcatgatttggctctctgtttgtctgttggtgtataagaatgcttgtgatttttgtacattgattttgtatcctgagactttgctgaagttgcttatcagcttaaggagattttgggctgagacaatggggttttctagatatacaatcatgtcatctgcaaacagggacaatttgacttcctcttttcctaattgaataccctttatttccttctcctgcctaattgccctggccagaacttccaacactatgttgaatagaagtggtgagggagggcatccctgtcttgtgccggttttcaaagggaatgcttccagtttttgcccattcagtatgatattggctgtgggtttgtcatagatagctcttattattttgagatacgtcccatcaatatctaatttattgagagtttttagcatgaaggattgttgaattttgtcaaaggccttttctgcatctattgagataatcatgtggtttttgtctttggttctatttatacactggattacatttattgatttgcatgtatcgaaccagccttgcatcccagggatgaagcccacttgatcatggtggaaaagctttttgatgtgctgctggattcagtttgccagtattttattgaggatttttgcatgaatgttcatcaagtatattggtctaaaattctcttttttggttgtgtctctgcccggctttggtatcagaatgatgctggcctcataaaatgagttagggaggattccctctttttctattgattggaatagtttcagaaggaatggtaccagttcctccttgtacctctggtagaattcggctgtgaatccatctggtcctggactctttttggttggtaagctattgattattgccacaatttcagagcctgttattggtctattcagagattcaacttcttcctggtttagtcttgggagggtgtatgtgtcgaggaatttatccatttcttctagattttctagtttatttgcatagaggtgtttgtagtattctctgatggtagtttgtatttctgtgggatcggtggtgatatcccctttatcattttttattgcatctatttgattcatctctattttcttctttattaatcttgctagcagtctatcaattttgttgatcctttcaaaaaaccagctcctggattcattaattttttgaagggtttttttgtgtctctatttccttcagttctgctctcattttaattatttcttgccttctgctagcttttgaatgtgtttgctcttgcttttctagttcttttcattgtgatgttagggtgtcaattttggatctttcctgctttctcttgtgggcatttagtgctataaatttccctctacacactgctttgaatgtgtcccagagattctggtatgttgtgtctttgttctccttggtttcaaagaacatctttatttctgccttcattttgttatgtacccagtagtcattcaggagcaggttgttcagtttccatgtagttgagcggttttgagtgagtttcttaatcctgagttctagtttgattgcactgtggcctgagagacagtttgttataattgctgttcttttacatttgctgaggagagctttacttccaactatgtggtcaattttggaataggtgtggtgtggtgctgaaaaatatgtatattctgttgattttgggtggagagttctgtagatgtctattaggtccgcttggtgtagagctgagttcaattcctgggacccttgtttactttctgtctcgttgatctgtgtaatgttgacagtggagtgttaaagggctttcttgatatagaagaagagaaagtaagccacttggaaaatatatttgaggatatggtttagaaaaatatccccagtcttggtagagaggtttacatgatataagaaatccagagacctcctgcaagatactctacaagacaaccatgacaaccattaccaaggcacatagtcgtcagactacccaaggccagtgcaaaagaaaaaatcttaaaggcagctagagaaaagggccatattacctataaagggaagcccatcaaagtaacagcagacttctcagcagaaaccttacaattcagaaaagattaggaaacctttttttttttttttttttttttgagatggagttttgctcttgttgcccaggctggagtgcaatggcaccatctcggctcaccgcaacctaaacttcctgggttcaagcaattctcctgcctcagcctcccgagtagctgggattacaggcatgtgccaccatgtctgactaattttgtatttttagtagagacaggttttctctatgttggtcagggtggtctttgaactcccaaccttaggtgatccgcctgccttcgtctcccaaagcgctgggattacaggcgtgagccaccatgcctggcctggggaaccatttttagcattctaaaatagaagaaatgtcagccaagaattatatgtcttcccaaagcaagctccttaaacaaaggagaaataaagtattgcccagacaagcaattcctaaggaaatttgtcaccaccagaatggccctacaaaagatgattaagggagttctaaacatggaaatgaaagaatgatactttctactacaaaagcacacatacgcacatagcccacagactctataaagcaactacacaactgagacagcaaagcaactcgctaataacagtatgacagaaaaataacctcacatatcaacagtaaccttaaacaaatccttaactcattatatgaaaccggtatcattctgataccaaaatttggcaaatgcacaacaacaaaaaagaaaactataggtctatatccctgatatagttgcaaaactcctcaacaaaataccagcaaagtgaacccaacagcacaacaaaaggttaattcaacacaatcaagtgggcatcattcctggaatgcaacgatggttcaacatacgcaaattaataaacatgattcaccacataaatataattaaaagcaaagactgtatgatcattttaatagatacagaaaaagcatttgataaaattcagcatctcttcatgataaaaaccttcaagaaactagacgtcaaagggacaaacctcaaaataataagagtcaactatgagaagtccatcatcaacatcctactgaatgggcaaaagctggaagcactactttaagaactgaaacaaggcagcgatgtccactctcaccacttctgtttaacatagtattgaaagcccaagccagagccatcaggcaacagaaagaaataaaagtcatccaaatacgaaaagaggaagtcaaattatttctctttcctgctcatatgattctatgcctctagaatcctaaataatccaccaaaagactcctagacctgataaacaatttcagcaaagtctcaggatatgaaataaacatgcaaaagtcagcagcgttctatacaacaataacattcaagctgaggatcaaatgaagagtgcagtcccatttaaaatagccagataaaaaataaaatacctaggaatacacctaatcatggaggtaaaagatctctatgaggagaattacaaaaactgttaaaataaattatacatgacacaaacaaatagaaaagcattccatgctcatggattggaagaatcaatattgtccaaagcgatgttcaaagcaatctacaaattcacctctatttctgtcaaactaccaacttcatattgcacataattagaaaatactagtctaaacttcatatagtatcagaaaaagatcctgcatagccaaggcaatgtagagcaaaaagaacagacctagagaaatcacattattgcttcacactatatctcaaggctacagtaaccaaaacagcatggtactggcacaaaaatagacacacagaccaatggaagagaatagagacccttgaaagaaagccacacatccacaaccaatcttcaacaaagtcgacaacaacaacaaaaaaccacagggaaagaacaccctattcaataaatggtgctgggaaaattggctaaccaatatgcggaagaatgaaactggactgttacctctcaccaatacaaaatttagctcaaaattaactcaaaaatgtattaaacactcaaacatcgggtgtcaaattgtaataattataaaaactcaacattaactcaaaatgattaaaaactcaaatgtcagatgccaaattataaaatttctagtagaaatcctgggaaattattataggtattggtataggcaaagaatttaggatgaagactccaaaagcaaatgcaacaagttttttaaataggcaaatgggacttaatttaaccaaagagtttctgcacagccaaagaaactctccaaaagagcaagcagacaacctacagaatgagagaaaatattcacaaactatgcagccaaccaaagactaatatccagaatctataaggaacttaagtgaatcaacaagaagaaaacaaacacctccatcaacaggtgggcaaaggacatgaagagacatttctcaaaagaagacatagaagtggccaacaaacatatgaaaaaatgctcaacattactctcatcagagaagtgcaaattaaaaccacaatatggtatcatcttacaccagtcagaatggtaactgtgtttatcagaaacagccaaactattttccagaatggctatacattttatggtacattttactgtaccattttactagcaatgtattgttactagcatcatatgagaaatccagtagttctacattttttgtcagcacttggcattagcagtatgtttttgaaataattagtcattctaataagtgtgttttggtgtcttattataaccttaagtctcactaaaggctagtgatgttcaacatctttttgtggcatgtctgtcattcctatatcctgtgtggaaaaatgttcaaacttttgccctttttgtaatcaaactgttttttttcccttactgttgagttaaaaaaattatttatatattctggattcaagtcttttgtcaaatatgtaatttgaaaataatttatctaaatgtatgccttgtctttttgtcattttaacagggtgtttgcaaagcaaagtatttacattttgatgaagtttaacttggtgatatttttaatagatcatgcttttggtgacatgtatgataactcattatctaatttttaaaatagattaaaactagtgagaaatacattttaaaacaaaaattataaataatgaaaagttttttgagagaagaatgaacatatatgaatgtatatttgtatactatataaatacatataatgatgatgtatacatataaatatacatacctgtgtatacatagccacaaaataaatttgctaaataaatcataagcaaaggaaaatattcaatacccactgaaatttagacaattgccagactatatgcctagctttataataataaatttagaagcttgagggcaatgaatgctgtttgtctgtttgttttgagatggagtcttgctctgttgtccaggctggagggcagtggtgcgatcacggctcactgcaatctctgcctctcgggttcaagtgattctcctgcctcagcctcctgagtagctgggattacaggcacgcaccaccatgcccagctaatttttgtatttttagtagagatggcatttcatcatgttggtcaggctggtctcgaaatcctgacctcatgatccgcccgccttagcctcccaaagtgctaggattacaggcatgagccacctcgcccggcccaataaatggttttctaaaaaaatttaaactattaaatgtaaaatctaaacaatacaataatcatgtggaaaatgtagtaattaaacatattcctgctgaaatggaaaacaatacatgggtcattatgaatatttcaaaaaactcataaatttctgcattttgtataattttaaaataaaaaatgagaacaaaattgtctagttaactaaaaataatgcagttatgattgaaaccaaatcatgacaaagtagcaaaatggagacataaatgactaaacaatttatacttaacaaaatgtgaaatgaagtcagaaaatgtcaattacagtgatcgaatgaagttaatattaaaaatgaaaaaaatctaaatttccagaaatctactaagagatttactaatttgattaatatatcaaataaaaaaaatctagaaagttacaattatctcaaaatattccataaaggtatataatacaattcaaaaatacatctatggcatataatagttttaatagtattatgataatatttattaaaattatatatgaggaatatatgctatatatatgtatatataccacacactggtaactagcatcatgattaatattaaaacatgaggcagtttctcatttaaatgagaaacaaagaaaggacatttgcaataatcactattatttataattattctgaaaatataaaagatataaatactggaagtagaaagaaagtaattattgttatttgcaaattatgtgattttatattcaagaagttttaagaaaagcaacaacaattagaattagtgaaagaattaagtaatggggccaatcacacaatattcaaatatagttttctgatataataataactcttcagatatataatacagaaaatgattacattcacaataacaaaactaaatattaatatttcatgaatataaaatattaaagaacatatatcagaataaatggacacatattgcataaaagatatacaactctatataaaaacttggaagaagacaactaattgtagaacagtgtcttatatggctaaataacatactattggaaaaaagacaattttcctcaaattaaccaatacattcaatttacatggaaaatcccaatatgatttcgtttttatttctttttaagaactgataaaaataattttacctgagaaggtaaataggcaaaagtggctagaaaaaaccaacaataaaggaagcataatgaatttggtttacctaatattaaaatatattgagtgaatcacagaaaacggtagaacctcccttcataaagaagacaataacaattataaatatatattcacctaacaatggagtccccccaaaaatgaagcaaacactgacagaattgaaggcagaaatattcaaacaacaccgtaaaccaactacacctaacaaacatgaaaaacactctccccaataactgcagaacatacttattctcaagggcacgtgtaatattctctaggatagacactatattaggacataaaacaagtcttaataaatttaaaaatactataatcataaaaagttttattctccaagaacaatggaatgaagctaaaaatcaggaagagaaggaagcatagataatttgcaaatatgtagaaattaaacaacatactcttaaacaatcagtgggttgaaaaagaaattattaggaatattagaaaaatagtttgagacaatgaaaacaaaaatacaacgaaccattggatgtagtaaaagctgtgctaagagagaaatttatagctgtaaacacttacattaaaaaatatagttctcagataaacaacctaacttcaaactttaagatattagaaaatgtaatcaaacctaaaactagcagaaggaaaaaaataacaaagattagagcaaagataaataagatagagaacaggaaaacaatagagaaaattaacaaaaataaaaattgtctttttgaaacgttaacaaaattgtcaaacttttagctagactgacaaagaaaaaagagaaaagactcaaattaataaactcagaagtggaagtggggatatcactaccaatatttcagaaattaaaagaattataagagaatactatgaataagtgtacaccaacaggttaggtagtctagataaatggaacataattctagaaatgcatatacaaaaatcaattcaagatggattaaagacttaaacgttagacctaaaaccataaaaaccctagaagaaaacctaggcattaccattcaggacatgggcacgggcaaggacttcacgtctaaaacatcaaaagcaatggcaacaaaagccaaaattgacaaatgggatctaattaaactcaagagcttctgcacagcaaaagaaactaccagcagagtgaacaggcaacccacaaaatgggagaaaattttcgcaacctactcatctgacaaagggctaatatccagtatctacaatgaactcaaacaaatttacaaggaaaaaacaaacaaccccatcaaaaagtgggcaaaggacatgaacagacacttctcaaagaagacatttttgcagccaaaaaacacatgaaaaaatgctcaccatcactggccatcagagaaatgcaaatcaaaaccacaatgagataccatctcacaccagttagaatggcaatcattaaaaagtcaggaaacaacaggtgctggagaggatgtggagaaataggaccacttttacactgttggtgggactgtaaactagttcaaccattgtggaagtcagtgtggcgattcctcagggatctacaactagaaacaccatttgacccagccatcccattactgggtatatacccaaaggactataaatcatgctgctataaagacacatgcacacgtatgttcattgcaacactattcacaatagcaaagacttggaaccaacccaaatgtccaacaatgatagactggattaagaaaatgtggcacctatacaccatggaatactatgcagccataaaaaatgatgagttcatgtcctttgtagggacatggatgaaattggaaatcatcattctcagtaaactatcgcaagatcaaaaaactaaacaccgcatattctcaccatgggtggcaattgaacaatgagaacacatggacacaggaaggggaacatcacactctggggactgttgtggggtgaggggagggggtagggatagcattgggagatatacctaatgctagatgaggagttagtgggtgcagtgcaccagcatgtcacatgtatacatatgtaactaacctgcacattgtgcacatgtaccctaaaacttaaagtataataataataaaaagaaatgcataaactaccagcaaaaaattttaaaaacatataaattgaacttcataaaaattaaaatttttatgcagtaaaggacattataaatatagtgaaaagcaaatctacagaacagaaaaaatatttccatattatatatctgacttagtttagtattcagacaatatacataactgttacagctcaatgacaaaaaaaacctaaaacaattaaaaaatgggcaatggacttgaatagacatttctctaaagaaaatatgcaaattacccacagtgatcctcaggaaaagatatttaacctaattagtcgttaagaaaatgaaaacgaaaatcattttcatttcacacccactagtaatcaataataataataatggaaaatagcaagtgttggcaggaatatggataaatgaaaaccattgtacattactggtaggaatgtataatggtacaattgttgtagaaaatgtggtgatttctcaaaaagttaagcatagaactgccatatattccagaaatttcctcctaactctatacccaagagaaatgaaacacatgcccacatagaaattagaacattaatatgaatgagtatagcagcattattcataatagccaaatttacaaacaacccaagtgtccattaatgcatgaatggattaacaaattatggtatatacacaaaataaatattattcagccataaaaataaattaagtacttgcacatgctacaacttgtctaaacttcaaaaacattatgccaagtgaaagtttaaagccagacacaaaatgtaacatattgtccaatttcttttaaatgaaaccctgggataagcaacccataattacagaaagcagacagaggttgccagggctggggagagggactggatggagtctgatttcaaaataagattataaattatttggtgttgagatcagtggcatgttccaattttgtatttctcccccagttatgagtgccataactgaattaagggtaagacctcataaacttcctgcactgaattgaactaaggccaaattgggccataggaactttgtacaaagctaccttcagactttaacttatatcttatataaactttaatatacctttggggattatattacttaattactatgttaagtttaaatatacagcttaaaactgctgattcccttcatttctaacttaagtcagtaaaacaagcatataaggagtgcctgctttgtagttggcaaggcacctaggggctgggaagatgagggaacagaggctgagactgcaaccaagcttaatgcatgggaagcactttcatctctttgcactaaaggccctgttctacctgcttctctcactttcttactaattacttctgaaagcaccatctcgataaattatgtgtgcatgaatcctcatttcaggctctgcttctagttatgctgtttcaagttcctgtacacatatgtatccctaaacttctttgctttcctttgtgtaactaggagctttgcaggggcactcactgaacaggtgcactgttctctgaggagcacagctggggatgtgtgagggatgaagggagagattgcttcctgtagctgctgttgacacaggaggagaggttatagagatatggcaaatgaagtcaaggctcagaaagcttaatggtctttttctgcattgtaactgtggtaaatggtggggatgagattaaaatgaatagatgtctaaatgctcattcctagcctcattctactgtactatactgcacctcactgcacgtttcaattacacctaattagaactgacctagggaatagtgtaggcttaaaaccagcccccagcaggtgtttcctttagtacagggctctgacaaaacatgtgatgattctctttgctctggtgctcataaatccccgatttctctcttgcctctcctccaaaattcacaccccaagtcttcacatcatccatgtaaataattgagcaatttcagatgaatttcctttaaaatattgaaataaaatttacacccagattccaagtaaacaatatgcgcagagttcagttcaggaacctcttctccttgtgtcaacagcaactacaggaagcaacttttgcctttattcctcacacatccccagctgttctccacagagaacaatgcacctgttcaatgagtgcccttgcaatgctcctagttacacaagaagaatcctggcacaaaaggctgtctatggttcattctagaatatgggaggagattatttgtcttgtctatggttcattctagaatatgggagattatttgtcttgtctatggttcattccagaatatgggaagagtttggctcttttgccagacacttaacagtgatcctcagctctagacacaaattccagcatggcagccgttcacaagttgcaagggtaaagccaggaagagccatgcctaccttggctgtcccctgaacaaagactgaatataatgatatgaattgactgtgctcaccacagtaaaattctctttttctcatttgaaaatactccttctgtcaagtaaaatgacattcactttcagagtagtgcccctgaaagaattcataaagggaaaatgttgagttaaaggtggaccattgtcaacaaggtgtgctttctcttcattcaaatgaggaagacaagaaacaaatcagctatattctgcttcctccagagcagcccaaatgcagctatagcttggattagaaacgtttcttttaaaacgaggggcaaaaagatgcatttccactttttgtcatctaaagctcacagatgactatttttttttttttactattgacttaagtctcacttgcttttatttgtcaagggtcttaggagtagtgtatcacagacccaccaagcctgctcctacctcatgggatttggaacagctgttccttctgactgaaatgctcttcccttcgggctcatttctgcagagttaattttcttacccccttcaagcctgtgctcaaatttcatttgctcaatgaagcctacccttttcctattgaattctgcctctctgcttccctctggcatttaattactcttcatcaggctctactgtgcaccttccttggcattcattattttctaatatgccatatagattatttattttgcttattgttgattatccgtttctcctacactagcatgtaagctcctaaaagacaagctgttcatgttattccttgtagtgcatgccagtatgtgctgttctgacatccccattgcctccccctacatctttatgactaaagcactcattccccagctcctgggaatgatggaagctgacagctcaagagattctctctcttggatctgctctctgcataagagcttcatttttcccaatgtcatgctcttccccagaaacattctatgtccagtgacttgtggattcaaaggtacaaaggctcaaatttgttacctccattcgggacaactctgaagggcatccaggttccacagctctgtggtaggtgagctgaggcctctgctgcaactgctccatgggcccgcttctctcttctcagtcttatttcccttccttccacaggtgtcaatcctaacaacatgacctccaaacttcctgctcctctaacatttatttcggtctattttctgaacacctgcaagagtatcaggcaggacatagttgcctaagaaatactgaatgcatgaatgaatgtaaatgcaaaaacaacctcttcatacaaaacctcagtgttgataaccaacatgtctgtgcataccttcttacaggtcagattggaattttctggtgagacatttttccatttttttttcactcaacaatatttattaagcatcttatgcatctggtgaagatataccagtgaattaaagggacaaaatctcttccccatgaatctaagattctcacagtggagtcagaaaatatgctaataaaaactgtatataataggatatcggtcagtgacaagagccctgaggatgtcatagaatgatgttgtgggaatgacagtgatatttgaaactgggcagtcaggtaggcccctctgatgaggtgagatcagctaagacaaaaataaaaggaaggagcgagttacacatatgtctgggttaagaatggtccatgatgaaacactctaacagcatgtgaaaaggccctggagaagaaaggtgcttggtgttttgagaaaaaagcaagggggctggaatggagtgagcaaagtggggaataatagccagagaatatgtggtgcatttggagcaacagccagttgccagaccaggcagggcctgttgagaagttggcattttattgggtgatgggatgattttgaaaggttttgagcaagaagggggcatgagcagacttctatttttaaaggaatcccatcctctaactgcctgtggcagtttgggacatgtatcaacatcctgcaaaatttctccatggcatatactgtagttgctcagtggaaactcacaggacaatgtcccttgatgccactattcagtacttttgactatcacagagaccctaaatacattgaattctgagtcacttctggatcaaccaacacatttccagagcctaccatgtgtcagggacaggccttatttgatcctcataatctttagaagttgacattgtgatctccttttgcagatgagaacactgagatgcacagaagctgaaggacttacccaagtttgcacagctagcgagtgacacagatagtattgaactcacatcctcattatgtagcatatatatgtatataaatatatataaaatatatatatattatatatatatattttttagacggagtcactctctgtcacccaggctggagtgcagtggtgtgatctcagctcactgcagcctccgcctcccaggttcaagtgattctcctgcctcagtctcctgagtagctgggattacaggtgcacaccacgacacccggctgatttttgagtttttactagatactgggtttcactgtgtcagccaggctggtctcgaactcctgacctcaaatgatccacctgcctcggcctcccaaagtgctgggattacaggggtgagccaccgtgcccacccatatcttatactttttatacaaaacctgccacatatatttgctctcctcttttatagtctgagaaggagtagaaggtagtaagagaaatgaccattcattgttcacagtgttaagaaacttagacacagcatttgaattggcccccaaacaactttgtgagtaggtattatggtccccattttatagatgaagacattgcgatataaaaccatgtattcaatgtgtgttatattgactggcatcatcagtaccacctgggagcttgttaaaaatgaagaatctggagtctaaccaataaaacagaaataataacagcttctttatacattagtgcttccacttttcattgtatcactggacaagaaatttatgttctctttacaaattcagattacaattcaggtctactaacattttattagccaaagcaggtcacccagccaagcccagcatcaatgcctggatacattctttgcccacagaaaaagagaaagtagagaatagttgctaaatgctaaaaacaaactgtcacagaggttattaatgaattgtggccattttcttaagctttcttaatgcatactaaaggtctttgcaactgttttgagggtattctaccaaatttaactgtttatcaaaggatcattttttaaacatgtacaatgccatctctggaagaaattctgacaagtacaattttctatatcttctatccccagacaggccttagcataaagtggcacctcagacagctgcctggatggaccacccattaatccggccctgttcctattctaagggaagattaaaggctcttggccaatagattaatgattgtgcattaaatcagttggactcctaaccacccttttttctatgaggtgtgttaacttttagaaaatgtattgaactataaactatccccagtcaagaaactgaatattaccagaataatgaaagccctcctctaagtctctcttcctgtcactatgctccaaaaccggtatcactatctttactctggttaacacacattggttttgcctttttctgtgctttagataaaaggagtcacaggctatgtgctcttgtcttacttctttcacttaacatgcttgtgaaattcatctatatttttgcatgtagttgtagatcgttacttctcattccatataacattcatttatctatatattttatataagtatggacaatttggaaacttctactaatttttagccactaggaccagtgctgctatgaatattctactatatcttttgttgaacttatggacacatttcctctgggtatacacttataagtagaattgctgggtgtaggatttgtgtatgttgagcattagtagattcttccagcttgttttaaaagtctatttttaagtttaataagagggtgatgtagacttagtcataggtacatgtggctacactttgcttataactttgtgattttccactttaaacttaacaaatctatttatctctgggcctaagctattctttagttgcaaattaggcagttttgaaagctgctctaacttcttcagctccctggggctctatccagtgtattactcacagattggtaagagatgaaggtccttgctaccaacattatcatgcacagagaaacttcctaacacacaatcacccagtattcctctaagaattgataatgtgtctggaaaattactattcttttagggtcccaatgatgctgcagagagggccaagccttgttcaagagctctgctaatgagatgaggctctgccaggggaagagaggtactgcctccttcctgatgtttgcatactcctctttgtcaagggagatagtcttaggcattaggatatggaggaaaacagagcctttggaggaaggagttagataaagagaaagacacactacttctgtctaaaacccctatttcaccattccttatggctccaagataaagtacatgccaacgctgagagtcaaagtttttttttttctcaatgtctctcatcagttacaaactatacatttatccaagagaatctagaatagagagagaacaaatattgagttgggggtcacccttcaaagggcattatctgtcagatgaaggttaccaatggaaataaaagacaagatacacagaggaaaacgtcatcacagcaccttatatcaggttgagtttttatgctcttttcttgccgtctgtttttgtttctatgtaagtacaaaagccatttagagagcttccttcacagagtgtccactatggtagagaagacgtagagaatatgcaggaaacaggatgtaaatagaatacaaattatgaagcagagtgattcataagaatataagaaagcaagtgtttttgaccttgcaaattatttcaacagagaggtagcatatttggcattgaaatagcccaaaggcatagctatatcttaaagtatatgtttaaaaacatgtgtttaaataaacatttaagtgcgccgtttaatacacctattttattatgtatggaaaacagactctctaggagtagtggtcagtgctccagaaggaattagttgcacactcaggtcgggaaattaaggacagttaaaggaacatgtttacaaggttgtgggcatgattaagagaaacaaacaaggaatgtgaagcctctggagctagcaatagtgaggggctgtttatcactcctaggatggaatgggctaggggaggaaataacaaccagcacccaggagctgcggctggaggtaaagaatttcagccaacttgcagtaacctggcacagggggagccaaattgcactttcctccctccctccaatctcccattggatggatccacctgaaagccgggaggcatggggcccactgatccggccaatgaagatcttccttgacctcaggtgaaaaacagagagattggcaagaggagatccatcctatgaatagtcacatttctcaagaaatgaaacaaagttcttcatgtagatcatgtttttttaaaaagcatatctattttactgttattatttaatgttcattaagcacttctggctcattaggcattcattaattaggatctaattctgcatgctccttttcccagctataaaaatcagcaggcttttttttttcagctgcttttatctgactaaaataatgggttcttttttcaacaaatggtagagggttatataaaaactctgaaaaaataccaacaatcaccttcaaaaggtgaacacaaaatttacggaagaatctataattatattaggattttacagggagaatattatctcccttcctaaagcaccttcctaaaggaggaggtatctcaatgtgcaaagtgaacctaatttcttattaaatataattttaagggggaaagctggtgcataaaaactcataaaaaagagcaacccaaactggaaactggcaattgtttaaggctcttttacaattatttaatctgtgtgtctttcctgactctgggcattctgctccttttgcatgtttgtaagctgagatgcgtgggaaataataaaatattatgcacagcccacaccccacatagaaagcttgctgtttctctgtgggaagttttaacttaggtcagcttcacctaagaattatttttctttctttctttgaagaaggcagattcctggtcctgccactcaaattttcaaagtgaaaatatttggtctgattttccaatgtatttccttgatgtcaatcaagtgtctgaaacattagtgattgtttttaccttgtacagtgaagtgaggtagcattttaattagggaagaaaaaaactgacttatgctcaaaagttcaaagcttttgtgacagaactcagagattgaggccaggaagtcatgatttgtgaatcaatgatcagatcatctgagccctttgtagagaagtaaaaactggcttccccctatccttctaggttttttggttgggctacaaattaaattgacataaggcagattcacaggagaaaaaagaaaattacatatacaggcactggagtccccaaaaatatgagactcaaagattggtcagatgattgaagcttatatagattcctgagctatagaaaaaaagtagggcttagggcttcttgagggtgatacctacacaagttaagagaggatgacaagaaaaaatatatgatgagtagaagtggtcttgttacacagatacaatttctgaggtaataaaagttgtttgggagaggaggcggctcaggagaaacgaggctgcagtggtggtagtaggaagatgttgggcaaggtccagcagcaggagcaaactatcgccaaggacctggtcgtgaccaagtataagatgtgtggggggaccacatcgccaaccgggtacttcggtcgttggtggaagcatctagctcaggtgtgtcggtactgagcctgtgcgagaaaggagatgccatgattatggaagaaacagggaaaatcttcaagaaagaaaaggaaatgaagaaacgtattgcttttcccaccagcatttcagtaaataactgtggatgtcacttctcccctttgaagagaggccaggattatattctcaaggaaggtgacttggtaaaaattgaccttggggtccatgtggatggcttcatcgctaatgtaactcatacttttgtggttgatgtagctcaggggacccaagtaacagggaggaaaggagatgttattaaggcagctcaactttgtgttgaagctgccttatgcctggtcaaacctggaaatcagaacatacaagtgagagaagcctggagcaaagttgccctctcatttaactgcatgccaatagaaggtatgctgtcacaccagttgaagcagcatgtcatcgatggtgaaaaaaacattatccagaatcctacagaccagcagaagaaggaccatgaaaaagctgaatttgaggtacatgaagtatatgctgcggatgttctcgtcagctcaggagagggcaaggccaaggatgcaggacagagaaccactatttagaaacgagactcctctaaacagtatggactgaagaggaaaacttcacgtgccttcttcagtgaggtggaaaggcattttgatgccatgccgtttactttaagagcatttgaagatgagaagaaggctccgatggatgtggtggagtgcaccaaacatagactgctgcaaccgtttaatgttctctatgagaaggagggcgaatttgttgcccagtttaaatttacaattctgctcatgcccaatggccccatgcagaaaaccagtggtcccttcaagcctgacctctacaggtctgagatggaggtccaggatgcagagctaaaggccctcctctagagttctgcaagtcgagaaacccagaaaaagaaaagaaaagaaaagaaaaaaggcctccaagactgcggagaatgccaccagtggggaaacattagaagaaagtgaagctggggactgaggtgggtcccatctccccagcttgctacttctgctccatccccttcccaccataccccagactttgagaagtacagttcttcttctccacctaggacccgcagcagagcaggggtctccctttctcccccatcccagttccccaacccactcccttccaacaacaaccagctccagctgactctggtcttgggaggtgaggcttcccaaccacagaagactactttaaatgaaaaaaagaaaccaaataataaaatcaggagtcaaaaaaaaaagttgtctgggagcagccctcagataattgttaatagtctgtctgggcatgagtcaacctccagtctcctgtcttgtaatttcagttcatcttccctggttgataagattacaggggaagggattcatgacaattgagtctcttttgaagaatgtcttccttaggcagataaaggaagttcagtaaagcccttcttttgcatttgctgttccccaaatgcacttgatatgttgctgttcctcaaatgcccattggtatgttgaaataatcagcataccaaagcaatagatgttggggtggctaaacttcctcacagttttggagttccactggttaaaaaaagctagttctggctgggtgcgatggctcatgcctgtaatctcaacactttgggaggtcggggcaggtggaacacttgggagtcaggagttcaagaccagcctgaccaacatggtgaaaccccatctctactgaaattacaaaaattagctgggcgtggtggtagttgcctgtaatcccagctactcgggaggctgaggcaggagaatcacttgaacccaggagatggaggttgcagtgagccgagatcgtggtattgcactccagcctgggcgacagagagagactgtgtctcaaaaaaacaaaaacaaaaacaaaaacaaaaacaaaaactagctcgaaggagcttataatactgctcacagctaaagataatactgaaagtggttggggatggtgactcatgcctgtaattccagcactttgggagggtgaggcaggtggatcacttgatgtcaggagtttgagaccagactgaccaacatggtgaaatgccatctttactaaaaatacaaaaattagctgggcatggtggcaggtgcctggaggctgaggcaggagaattgcttgaacctgggaggtggaggctgcagtaagccaagacagcgccactgcactccagtctgagtgacaagaacaagactccatttataaaagagaaaatactaaaagttaaccctgaaattgttagtgactttgatgcactgtttcagctctagaaaagtttttaccccacagagacaatggctacagaaaaaataaatgctgggctcagttacctcaggggacctggcagatgaccgtagttaagagagggagatcagatgttttatccagggaattgtattggagaaagaggggctgaaaaatgggattgaagtttgtgtccaggtagaagctctttctcctttatgctttatgtccagagcctgcttggaccccatgaagcaggctagaggcttgagtgagaacatcattcctgactgaagccagagcaatatgccgggcctctcacatatatttttatcctggacacttttccccaatgatatgccctggacttttctttcaaattaaattgccctcttttagccttgaccaaaagtgagaatctgggcccttgacagatatattgctattaatttttttttggagatgtagcctagcaaggaggggcctcatcttctgaggaaaccttagcattgatgagtactgactgagaggattggcaaggttcactcagatgaacgagatagggtgagaaatccactcacaagtggatttaacccaggccttctgcagttatcggggcatgtgatatcaaacaatagaatgagcaatttatgggtgactgaagtattagcattgtcaatattattttcagttgttatcatggttgtacagttcttactagcttctttagaccaatggtatttaaactttagtgtacaccatcatcgcttggagagctagtaatcctgaagattcaagagctccacttccagtgatttggtcttgagcaaaatctgggaatttgcattttaacaagctcttgggcgatgccattgtgctggttgtgagccacagtttgaggagcactgaggcactcatctgctgaccactggttgggcccggcggtctgttttaaaaagcatccaggtgataaccaattctcactaaagtttgagaagagctgtttaaaaccactggttcgcagacttaactaaacattggacccacatgagcagttgcttaaagaatgccaatgcctgggtctcactcggctgattctgatgaaattggagtgggaagcagcctgacatggggattatttgaagctcccaagatcactgtaatgggcagccaaggttgaaaaccatttgtagaccataccttcattcctgcattgcaagactacacgatctgcaatttgtactttccagtatgtcactatggtagaaaaagagatgggtaaaattctagcatctgaaaggaaataatctttgccaggcttgcatgaatttgatcctagcttatcttacatattgtacagactgtgagtaatgaagggctcaatttgaaagagctgggagtgagtcagccggaagaggtagaaatttgggcaaaagagcaagttctataaatctgtagaagtgaaacccatttagttacctccaaagggccaaatgtgctgtttaaaatgctccaatagagcattgaatttcacagctgtctgtagctttgaggccaaattctcattccctaaagttagaaaacagaagtaggagcagtaccaaaaagccacacatactactgagatattaattaagccccaaagacttcaaggacccctgtctggtcttcctaaatgcactattttttgccaacggatgcaaacagatttctcttgaccttccccatacttgacccagatctctaagtctaaatattatcaccataagaagatgtcaacattttaagttccagataatagattcctgggaaatgaacccacatatttttgttatttccccaagatcttgaaattttttctgtttttattaaagtctcttataggaatgtattaaacaataacaacaaaaaatcccaacaaaacaaaacaaaaactaagctagattcctgtccggaaatccagcaaacgttttaggcaggaaatgtaggtattttgccaagtcaaagcagtggatggagagtcagaaacacaggatccttgtcctggttttgtaccttactatgtgaccttgagaaggttgtgcaactcctctgagcctcattttcacatgtgtcaaatggcaatgatgtctcaggatccctttctactttaacataaaagaatcgtggtaggacatgggaatctgaagaattattattattatttgtttttttgagacggagtctcgttctgttgcccaggctggagtgcagtggcctgatctcggctcactgcaagctgcacctctcgggttcacgccattctcctgcctcagcctcttgagtagctggaactacaggcgcccaccgccacgcccggctaattttttgtatttttagtagagagggggtttcaccttgttagccagaatggtctcaatctcctgacctcttgatcagcccgcctcggcctcccaaagtgctgggattacaggcgtgagccaccgtgcccggccctgaagaattctttatgattgcaatgcattgcaaatctcttgtgtttggttgcaaactttcaactgaaacactgagtgaattgttgcctctgcaatgacaaaattttggtggtgccccctcctcctttctttcctgctgtataagggctgtcctttttcattgatatgatttaagagactggaaaaagtaaactattcttcaattcattcctcttaaagtgatagaagacacgatttttcctatgatctgctttcaaatcactctcaccggctgtgaatctcctcttgacggctgtgaatctcctcttgacacaaagttatcagctgaagatttctccctcagttggtttatacttagccacccttttgaaatgaggttccatttactttattggttctaggaaaatgcaggcattttaaggcccatttttgcttcttcctgattggaatggaaggggaggaggggcagggacagcttctctaatttgctggtgaactgaaaaatactccaaagaccctttttcagtcttcctgagtagatttgcctttgccaaaggatacaaatacacttattttaactttgccagccattgtgtcaatgtctaattttggaccatattaacaaaaaaaagttgacaaaatttaagtcattgagggagacagatccagccaaagctggcattggcattaatgatggacattgatagtgattggattaattttaagtggttgtatggaaggagttacttatattaactaagaaggtgccaaagggaagaaagcaaagcaggaagaagacagagttctggaattcaagaaatcttggcttgagttttcatcatcaattaaccagctatgagtatttggaacaatttctcaatggcttaatgtgtaaaatggacctagacccgtgctgtttgaactttaatgtgcatttgaattttctgggatgtgtttaaaatgtaaactctaaagtaggtctgtgggtgaagcctgagatcctgcacttgtaacatcttttaggtgattcagatgctacgagtcagaggaccacactctgagtagtgtcctcagtggataattcttctcatgctaccttccagatctagaagtaagcagataactaagtaagtaaagaaataacactcttaaactattctgaagagctctattaggaaagatactgaagtccaaattttataaattagcatgtgaatgtgaaatggtacctaagtggattctttacaatttcacacccactgcaggaaaaaatgtcaaccacagaagtaagatctgttggagaaataggcctcctggttatttttccaaattattgttctttgcttattggatacctcctaatctcactttaaaattacccagaagaaacctgtaacgaaggtttctcattttgtctatcagccagagaattatgctttttaagtttttcttaaatgtatggtacataaacaattggttttgttactaataattttttaaattgtcaacctagtaattttcttttaaactatttgtattgtagcataaattactaattttcatcctaagactgaatctacatttcagctagttacacagactattaatgtatatttgcatgctactgatgagaaactctccattgaaatcctaaccagaattaatgtagacaaatcaaaaagccttcgtagtttgatgtgtgtgggttggtttgtacaccccaagacacacttataacattaataaacatgatggttagaatataagtatgaatataaatttggctttctgctattttatgtttaactggttagtttttatgaggtttcagagcattcaggttttcactcagaaacgtagtcacttgtgacaggatgcatctttctggcagtaacagccagaacaagctgcccagctctccttctgaggaagtcattttcaggtttcattccccaaagactaaaccagcagcaaagtcaaagatgtggcttccttgcagtgtatgcttcggccactctcactttgatgaaatagaaagaggtgaacagggcagccgtgcttctatttcacacaagaaaacagaaaagtagaggagagaattttatttacagtgaacatcaatgcctcctgttaagtgtcaaaaaagtttcttcatagaatatgaatcttttgaagatacttaaaaaaacaactttacttcttcctcacaggataaaatagaaaacattcttagggtttttgtcataagtactatattataataatcctactaaaatttaagctaacatgaatttctatatggtaccatattaataataaaagcagtgaatttggcatcagaaaacattgaattgaaacctgactttgaaccagtcagggttctctgggactcaatgttttttacttcaaaatattggtttcggtattcactaaggtcctaccagccctgaagttctttgatcagtttttcaatgatgttttagtgttctaatgtttatttaaaaatttcaaaatatgcttactgctcttcttcacatatgttgtttttcacatttaacatttttcataactgggctattcccttgataaaagtccagtatgtagtttcctgtttgatattagggcctcagaactgaatacaattattttggtccaggatacagaagagggctccaggagcgtagacagatgggccaaggtaatgtgagtgtgctctttctagctggtatcttggtgagtgagtttgtcttgttagaaagctatgctcttgggagaggagtttcaaactgaccatggataattgctttgtaagagccattttcagatggttagccattggctcacagaggtgctcagtgagaaaatgaggtcagtggtatgttggggctgactcagctcctatagccctgcaaggtcaatcatgcgcctctacttaaccccatattcagtgacttcgtatctgtggcttggaattgattacaacgggtatatttacatcttggaactagcaaatgttacaaatcaggatccttattgtagtcagttgttaacaatttacaaatactacaactgggtatctcacaaccaacacacacattcagaattttgaagtgtcttttcatcaaggcaaagaatgggactagaacttccctctcccaaatgtccatcttttatgatttattccccaatctaggatgtctacacaattaatttttttaagtgtgtaaagtgtactatttttataattatatatttatattttataattattaaaggattacacatttgtaatacattaaaatgaattataaatggaagagacaaaataatcatccatatttacataatccaaattattactattagtaatattattagtagtatattactatcagtaaaatttttcctataagcgatcctgtgaaaattgaatacaggtaatttgcttaacctatgactcttccacgacttaggtttcttcccaatttgctattataaataatactgtggtgagcaacttgatacaacttaaatagcatagaaaggctgtgaagaggaaatataaaatgtttgtttgagacttgaacctcttgaattgttgacaaagtaggggagaagatggcatgaacagtttaatcatggccgagaaaaattcagctgtccacagagcagtttggagaacctggtgatttattgaagtcctctaaataccaactgaatggtgtatgtgggtgtgttgcgatgttctgccaggtggttttgaaaagagctttccaaggtttaaatcaaccctatcatcagaatcagagcaaatgccagctatttttttcataccctaattctggacctgattgggaacacctgttaggaatattgttcatttgatgcatattgagtcaagcaacatggtcacaaagagtttggtaacagcaaaggtagagccttgtgttggtgggtgaggcaaaaactttctgtgaagccttgtttgccaaatccacctccagattcctgggccagcgtgttcctgaacctaccgccgaggcagcacagctatctggtacattgtgttccctgatagctgtgctttgaatggatttgtgtgcatctccacctgctctgttcacccaagtaaaggttctgttgctgaatgcactggttctgaatttattaaattcttcatttaatttgacttaccacacatttaatgtgcaggtgtccactgcaaggtaggcttctgtggttgtttagaaagttgagcagacactgcccacatttttgagactggcagtctaacagagggcgataagaggtattaaaatgccctgagtagaaggtacatgggatggaggctatcataagaattaccactatgatacgagaacagagggaaaaaagagagaaatctgagagaggagatgtaaaacaatgccttcatcagagtagtggcatgggtaatttttcaacttgtgaacacagaataaagaaatgctagggacagtgagtttcatgaacaaacaggaagctaataacaattgctcattcctaagatctattttttactcacaacacttctgacaccaaatgtgtgggttttccacaccaagcaattctcttgcagataccaactgtttcctacacttttatttaattctgaccctaattacctggagttagtacagatccgacatgttaagggctcagtcccacaagattgccctcctgcttctgaccaattataagtagtggatccttaggttacccgcacttctaacttggccagacgttgtgggttcccacaaccccctcctcaggctttataatttgctacaacagctcacataactcagggcaacgcctatgtttgccagtttagtataaaggatattaaaaagggttggcagatgacaaggtacatagggtggggaagggtccctcaatgcagaaatttctgtccatgttgagtgggggtgcactaccctcccagcgcacgaaaccagaagctcatcaaatcttattgtttaagagttttcttagaacttaatcaccagctcccccatcattcccagaggtgggcaggtggggatgaaagttttagtcttctaatcacttggtcttccttgtagccagccccatcctgagactatctagagtacctgccataagtcacctcattattgtaaactcaggtgtgatcaaaaggagctccttatgaataataataaacattcctatcattcagaaaattcccagggttttaagagttctgtgccaaaacaaggggcaaggactaaatatatttcttatgacatcacacttataatgttacggtgcttcttgataaagagctttcacatatgttatcacagttaagttaggaatagaaacatgctgaattggctgagcttaggtttgagggacaaaggtggaactgtttctgggacagttcgttgttgctacaccacagatgatatgctaatttggattttctcaagagcagatctcaagataaagattttaagtagtctatttgggaaataatcccaggaagtagggtgagggaactggggagcgaggcagggaaggaaggaaaagcaaccaaagaaacctgagttagcagatgactcctagggctaggacaagtgtgaggagagggaagctcacccaggttgctgaatttatgggagtttcaaacactcagtagtcaatacagacaatattgtaatataatattttaaaccatcaaaattaacacaaaaatccatgatacacacattattaaaattttaaataaggacaggatctaacaatactgcattgggccatataggagcctgaggaaaaagacaacaatatgcaagaatacctttctttgtatttttaaaatggggaatttttttccagaacatttaagtacctgaaaaatgtaaaatttaaaagtagaagtattaaaactcacatcattattttaaatttaaacattgtatttatatcaaaaacatttagctatacttttactttattggtttccatggaagcaaacactaatagtatttttattaaaaccattagccatttaaaaatacataaaaacaagtacacagaagcatacatatttccttttgcctcaggcttcagtacggcatacatggcactggttaccactgtggacttaaaatgctggggatcctctgagaattgtcctactgagaaggtaggaaatttaggctcattgtttagagcttttcctgtgggtgttgactctggcactccccaccatgcccacagtggggaggccaagacctgttggaaaggcactatcattgtctgctgttgagggcttgatgaacattcaagaaccacaggcttttacaatgaaccctgtggaagccccaagggttttgaagaaggtgtgggacaatgatcaaaactccactttagaaacatttttatggagccagacacaatgactcactcctgtaatcccagcaacttgggaagcagaggtgagagaattgctcgaggcaggagtttgagactagcctgggcaatattttgagaccctatctcaataaaaaaaaaataaataacttaaaaatattgtaatgcattcactatgtatagtgggttggggaatgagagaagctgaaagcaggaagggtgatttagaagcaactgcaatgccttggttgggagaaaatgtgggcctgagctaggagtgtgtctatagagccagaaagaaaagagaaggggaaaaaaacagagcaggacttgagtcattgtgttctggccaccaaatgaatgtattaggccaaaagaaaggaagatgtacagatgaggctgctgttcctcatcaatggctgagataatggtggttttgtttttagagatgagcgcttgagagaaagggcagatttggtgagagaaaggtttgggttgcagtcagtggagagaatttcaggttggactcacatgtccatggagacaaaagatttggagggccagaaaattgcagaactctttttgcctaggttgatgttcatggtataacagttgtggaatatttacagttttgaaggagcttgatccccgcccccatacctcaagtcaatgggaagccatggggttttgtggaataaaaggctgtggtttccatattggacaccatgagaaatggtagcagaggcagagtgaaagtggatattagattggaggctgctgcaggagtcctggtaaataaggatggtggtttggacatttatgggtgtatgtcatctcacattggccactggccttctggaatatttacattactatgttcatgagacatccaagtggggaggtgttttaggcatttgaaaccgcttgttttagttcaagagaacattggtgcaaagtacaaaattttgagaaaatgacataatctgtggcaccattacctagaggcagtggatacagatgtgattcaggaaatagagtagaaaatatagcacagaatctcagacaagactattgtgagttgaattgtgtttccctcaaaatatgtcaaagtcctaacctccagtacctcagaatacaatctcatttggaaataagatcattgaagatgtaattagttaagatgtggtcattctggagtggaatgggccctttatccaatggaactggtgtcattataagaagaggaaatgtggacatagcacagacccacgaaaagataatatcaagtagcaacagaggcagagatggaagcaatgcagctaacagttaaggaacaccaaggatcgagcctaccagcggaagccaggaagaggcaaggaaggattctccacagagtctcagatggagcgtggctctgctaacaccgtgatttcagacttctggcctccgcaactgagagagacaaatgtccgttgttttcagccaccctgtttgtggtacttggttatggcagttctaggaaactaatacaaagatcttattttagaggtgagagaaaatgtaaatgaataaaatcaagaaggactggtgagaaacacaaaaaaataagctggaatgtataatacagcaaccacaaaaattaagtgttttaagaaaaaggtgttgaggagggtaaatttacttgagcagtgaaggagaagaattgagccaaggctctgttcattgtccaccttagcgagggtgggggaggcatggaacccagaggatggacagagagggaaaggcaagactgtggagtcatggggtacagtctctatattgagacatttggaggaggagagatggagcaaagatacagtaaggtgagagttgaaggcacaaggctttatttttttattttcttccctctgtgtctttttttttttaaggataagggaggctcacacttattagctgaaagtaagtttgtagttagtaagaccagaaatgaaaaaatagaagcaatgaagggtgcaggcttctaaacaaggcaggatgagataggaccaacactaaggatgtgaatcagtttagagacaaggaaacagtgatgaatagaaatgctggcctggattacggctttgctgcaatccttcaccagctgtctcacctcaagccagttactttgcttatgtaaatctcagatacgacaagtaaaaaatgctgtacagattaaatgagacaataaactgtcaagtttaccacattccctagaacctattaaataattaatttatatacaatatataatatacatattatatgtgaaatactatattttatataatatgtatattatatattggatacagtaggaatatttacatcatggaacatattgtactgcatatacataggtattatatatgcatatatgtatatgttattgtatgtgtatattatatataaatttttatatagtatatatattatatattttgaaatatatattattcaaatacatatttgtatattatatactatatatttgaatatacatatatattttgaaatatattattcaaatacatattatataatatataaaatatttcaatatataacatatatattttgtatattatctaatatgtatattatatgtaatatgtaatatttgtagttataatatgtatgttatataatatgtacatataaaatatgcacattatataatatacacaatatataatatgttatatattttgaaatattttatatattatatataatatgcatattatatattatatatttgaataatacatatttcaaaacagagcttggccaatagatagtattcagcaaaattacatttccttcgtactctcattcctttttgatgagacaaaatagaaaggaggatttggatatatacatagattaaattctgaagtaaaggaagaaactagagggaaaaatagatgacttatctttggtcatgaagtagaaattcatgagctttgtcctctgaaaagctggtgaagaatcacatgaacagaaaagattcagggcaaacactgagtggaatgaaatggggaaaaataaaatgactatggagcaaacttaagaaccttggaggcagaatgcaacacatttgagaatcctaagggttcaactgactttctctgtgggaagcccctaagatgaaccccagtgatatccactgcctgcctggtatccacacccttgtgtaatctccaactctcacgtgtgggctggacttactgacatatctaacaaacagaataccaagcaagggatgggatgttacttctattgttaggtcataaaagatcatgacttctgtcttgggtgctcccgttctcactcttttgtcacttaccttccaaggaagccagctgtcatgtcatgaggcagccctgtggagtgcatgtgtggtgaaggactgcagccctcagatggggctatagagccaccagtggcttgactgcaaccttgtgagagacttcgagtcagggtcatgtggctaactaagctgcccaggttcctgaaccacggaaaccatgagacaatgtttgttgttttaagctgctaggttttgggtaatttgttactcatctctagataactataataatacactcattatccactaaccagctgaaacagagatatcttacaaaggcgttttcctggggttggggaccaggtagctgggtcaaagaaaagatatttttttcagtgtctttcagaagttcagtgccctctcctgcaaaatgcaccaaccttttcctggtgaaaggacatttatgtagttcaagaccattggctcccactgaacttgtgaaggaaagggttgcagctgtcagcttttaccccatttaaaattgtcagtgccctgtgcctgctgagtgtgataatctcagaagccctgaggctgccatccacgtttaagacatctcactactcagccaccagcaggaaccgcttctacccagatgtgcctcttagctgcggtgttcacagatacccatttgtctagttcattagtgactgtaatgtaagaattttctggaaatgacacattggggttaagtgggagagttcacttgaagttcagttcacagttcacatcttagagggatggcctcctcttgggctgtaacccataagaatgtgtgccttttgcacttcaggattcctggagattgtggaatgtgactagcataaaccagataaacaagtagacaaggtggcatattttgataactaatgcatgtctcatggggtttgatttaccactgtcttggcctgtgggtggaagtctgtcctgctagttgttccaaagatgtaatcctctcctacctttatccttaggactacttttcatttagggtcttctaggtgtcttgaaatgcagtaaagagaattttccacatgaataagttgaatgctgacccagcagtttcggaggccatttggaaatccagctactgttgaaagttgttctttaataggtgacaacaggcagaacaactaacatctccaccagaggaaacacagtacttgctgaaatgcactggactgtttgtgggacctcattcatatcccacacaactccagggggcatgagatggagctcacctgagtggatgcgcctctccaaatcctgccttcatacttcccatgttgtttcaccatggtctcgttctaaacctctactgtccataatttatcttatactctgggaagtttttcctatttagtgagaagagaagactttctcctaaagctacgatctctgctccaggtttttggaaaaattaaaaagagtaagaatttttttaaaatttatgttttttctgtatcatctcttccctgttgtctcaaatatacaattcctaacctgactggacagaggaaagtacaaggaatcaactaaaaatggcttaatgcttcaaatatattatctttgtatttgccacatatgcataaatacatttatagaatctagaagctatttatgatgcagccatttctataaacagtaatttataaataattgatgtggtttggggtccttaaagtgattaagctctacagcttagcatcctgggacagccattaaagtcagaacatcacaattctgcacctgtagtgcctggggtgcccctgggatttgctcaggctgtaataacaataattgcagctatttgttgagcactgatgttgtgaaagaccctgtactaaggactgaatgctttttatccattatcaatattccatatataactctacaaagtattattttttcccatgttacaaatgaagaatctaaagctcagagacgttaagcaatttgttcaaggtctcctaggtaaaaactggcagagctgatgcacagacccaagtctgcctgattccagagaccctggtctttctgctctaccattggattggcttgtattttccccatgaggccaggacatgtgtacaggcagtttattcgtgaggtgatcctagagattaggacagaggaacaagagagtgtgaggaagggaggaagagccaatatgagaagcattttcctggggtcactgccatgaaaaacttggattcaatcctttctagaactttctaaacagcttacagatgtctctcagagtcttcaatttgagaaccaacagggagaaatgattatcccccgatatttgagggctgtctctggaggtcctagaagctctgtacttccaggaagtccatccatacctgatgaatggtctgtgttgcctctgaagcatgagggaagccccataatagaaagagaaagactcacaggaaacaattgagatgagatacagtgggcacagaggaagtctacgcctataaggacctgcctgctgcacccgcacctgggattgcagtgaggctgagactgtgagctggggcaccaaggtcctctgatacagtcacactcccccacattcagctctttcaggccacattgaccatgtgaagccatgtgaagccttctgcctcattgacacccaagtgacaaaccagctccaccccacaaattaagtcttcaaggattttcttccttattgaaaatagcagatagaccaatgagatcctgagtttcttgttgaaataggtgctgttttccaatggaaaataggaggctagaagaatttagttaaaatattctcctattcaagatataaataacttgatgttcagtatcatgttgccatgagaccgagtaaacaaaggtatagctttgattcaataactcagaaggggctgagatttccctccacttgcaaacaaatgggcgggtctgccatagtttcatggaggcaggcagaatataggagactcctgtgtcagagaaaaaaggactttctcactcagggcacaccaagaagcatgaacattcacttatttttgttggttctgcttaccctcaagtccaacaggggctatgcaagtgggcccaaatggatgcctatacatgtagtaggttgcattagagaagggaggagagaccttgagcttaaggaatctgaagcttgtatattggcaggcaagctctccctttgctcagaaggagacattattttattatcctgggtagtaaaaatgcctgccttttcctctagaaggagatactgtacctaccttccaaggatatgagcaaacctccccttgacatcagagggagacactatctttgtcttccaaggctgctaagtatacaaatatcattgaaaagataacctggaacaaaaagcagattatgcctcactcacaagatgtgcagaaatgcaagagatccataaataatttcctttaatactttgtttgtagtctagtagcaacagaatcgacctctggttgaccagtacatagattttgttactgccttggtgacgcatggcacatttcctgactttggagggacagaggatgaaaggacaggcctaaaatacttggatttgcagcaattttgaatggagagagggagaggaggatagtaggatggtgggggtgggaaaataaagaaataaggagagagactcagagagaaagtatatgacatattcagaagaggagacggaggtatagaaagcttgggtggatggatggttggatgggcagatggaaaaataaagattaatgcatccatggatgggtatataaatggatgatagatggattaattatgcaaatagagagattgaatgagtgagagaaagagaatgaaagaataagacacagggaaaaacggggagacagatagtaatccacagggtctgagacagagttagagaaagtcacagagctagaaagagcaaacaggaagacagagagacacatggagatacagagaaaggcaaagaaataatatgattggatggacagacagagatgatgagtgaaagaaatgaaagtaatggatagatggatggatatatggatacaagataattaaagagagagaagaggtaatgtaataagaaggtcatgagtctgggctctatattcagatctggtggtttgggttctgtcaccgtctaactgcatagctttcagcaagttcctttcttcatctgtcaaatgggaatgataatgataatgctggcctcagagggtcaatttaagtctgaaataaaataatcctcatacaggcttaggaagttggcaggcacatgataatgatattacatagaaagataacttgttacatcagctgagacacccattcctataaatcttataggctttaacattttcagcactcacgttaaatttttgcttcccattggagctatagctgagtctggcagatgtgtcaaaccctgataaagccaacactagcatccaacactcaaatagcaattttatgcaaacgggatcttctcattatgttatccttctgcaatccataattattgcttctgaatgaatctgaggttttcttcatttccgtgaaatgaggtcacactacttatacagtaaattaaaggcaaattgagcagatgatatgtataaaataggaaacatgcagtttttagggctattgacacagtgctaaatgagttggtttccaatccaaaccaagtatttatataatttggttcagcatccgtacattcagatggaaacccacactctttacagacttgttactcttttactctttatagagttagcatttatgatgaggaattacttcttgagtcctatgattccagttttatatccaagcacagaatgttttacagttcattcttgctaaagaaaaaaaaaagatatccttgcctaagtgcctaagttattttggtatttcacattatggtgaagcattgccaaataaattgacgtgaaaagcacaacctaaaatgttttggctacttcacaatgcgttaaataatcttcttttgggttgcttctttaattgttcttcatacatctaaacatttacatttcaaaggatggttataatttctaggacatactaataactaattcaattagttactcacttttaatgagggtgaaatgaataaaaaatatactgatttagaaaaaatatgtgtgtttttttcaaacacttctttgcctctctcatctcttaatcctcattggccttatgagtaaacaattacgcagatggtacaatttgaagagcaacatcataatgcatatgaaagagcttcacaatgcattcctgtcctttttctgttaaatatctctttagtcatgaatttctactattagatagtcttttatttggtttagatagccttttctatataaaccctatttcttcttagagacagagggtctcactctgttcacccaggctgaaacatagtggcgcaatcatagctcactgtattctggaactcctgggctcaagtgattctcctgcctaagcttcctgagtagccagggttacaagcatgcaccaccatgcccactaatttttttttttgtgaggtggggagggcatgggtagagatgaggtctcactgtgtttcccagactggtctttaactcctggcctcaagccattctcccacttcagcctcccaaagtgttgagattacaggcatgaaccgctacacctagcctatagatccctttttaagatgtaaacacatctaaataggaaagtttcaggtatgcttgaggtaaaatcactttatttagatcattttcctttctaagcattcagattcgacaaacatttttgaacccaactttagtgttggtcttggtggagtgacacagtaaagaaaggaggcctgtcactcattcattcattaatttgcccgttgttcattgaactcttactatgtgttacacactgtgctatacaactgagtgtattatatagactttttcatcatgggacatgtggtttatttagtgaagtgattaatatgtaaataatcacagaattaatatctagagattgcagtgacctcgatgaaggggagttgcaaggagttacaatgatctgaaaagattctttaagaatgtgaaagtctccaaaagttaactttgctagggccatggggctaaccaagacagcaagctcatatttaaaggatcaaatgcttctgaacaagaagtagaaacctttgcagaaaggagaaaaacagcagcttgatggtctagtgagctaaatattaaaagcaaagtttccctggaaagtaaggttccattcactattttctctggcccagagtgttgatttcttatttcttttcaaataagaaaacagggtcagagtgatttcatgatttacctaatgttacccatctaatctgtggctatatctagaccttgacccaagttttcttagccccagaacatgttagaaacgtcctgtctcgtaaacaaaggtaagaagcactgccctaacgcttgaaattactgaatgtgatgctaaacatatgtctaatttgtgtatagatttgcagagaaaatgtatatgttgggttatgttacagtaacaaacaaacctcaaatgtcagcggtttaaagcaccaataatttgcttctaagcttctatatgtctactgcaggtcaatgggaggttctgctcattcctgctacacatggagcagtcaccattgcaaacattgcttctcatcatgccaaagggaaatataaagctttataatgtcttccaattaaattctccagcctggaagtgacacagtgctgcttcagctcataacttattgattagaactagtcataaagccctattctttctgctggaagatgcaaagacagagtgtttggcagaaactaatgactcccacagatgccaggatttagacttcttttatcctgtcatttatccaccaattatttactgggcacttgttatgtgaatataatagtatattcatccactattaatgcataattatcacagaatctcactgacatacaacaataagcattatttttcttttgttcatgtgttcagtgccttgggtctgtctgatctagcttgtgctcagctaagcaagactgtgagctataaactgtttaggttgtatggttctatgacgtatagcccatattctcctgataccagtggttgcatgaggcatgtgattctcatggcaatggcagcagtataagaagggtagtgcagacatgtaatgctcctttaaacctaaggcttggaacttccatgctgtcacacctgtctacattccattgatcaaagcaagcctatggccacgcccaacagcaagagtgggcagagaagtgtaatccatctctcttgggacaaactgcaaagactgtgacaaaatacggagattcaaaacagggcaatatttcaatcaatacaagcataaatcagactgaaattcttaactttgtgtagcttatattctgtagaaaaattatcgataaggaaaatatgtaaaactttaggtgactataactgttaaagaaaagaaaataagggactgggtgtggcagctcccacctgtaatcctgacactttgggaggctgaggcaagagaatctcttgagttcaggagttcaaaatcagtctgggcaacatagggagaccctgtcttaaaaagaaataattttttttttttgagatggagtcttgctctgttgcccaggctggagtgcagtggcatgatctcggctcactgcaagctccgcctcctgggttcatgccattctcctgcctcctgagtagctgggactacaggcatctgccaccacacccggctaattttttgtatatttttttagtagagatggtgtttcactgtgttagccaggatggtctcgatctcctgaccttgtgatcctcctgcctcagcctcccaaagtgctgggattacaggcgtgagccaccacgcccagccaataaataaaaatttaaaaaaaaaattaagcaaggaaggagggtaagaagaacaatcatggaaatagtggttgaaattttagaccaggaaagaagaccttgtaaaataaaatgacaatccagtacattttaatggaagtgaaagaggcataatgtagatatctgaggaaaattaggaagaagcaactgcaaaggctgattgatgttgggggtctatatggcatgcttgaagagcagaaagagggtgagtcaaagtgagtgaggaacagcaaatgagggataagctcatattgtttaggatcagtaaaacattttgtcttgtaactctgaatggggtgaaggtccactgggatatttctagaaaaagaatgataccatctacttataccttttattagaccaatctggctagcctttggggaatggaatattggtggggaagaaatagagactagctaaaagattatcacaatattataggggaaagataatggtggcttagggaagtatcatagcagtggatgtggtgataaagcattgaatcggttgaattctggaaatgctttgaagttgagacaatcaggtttgctgacagatcatatttgcaatatggtgttaggaataatggcaaggattttggtctgatcaactgcataaaaacagcattgctggccgggcactgtggctcacacctgtaatcccagcactttgggaggctgaggtgggtggatcacgaggtcaggagattgagaccatcctggccaatgtggtgaaaccctggctcactaaaaatataaaaattagctggacgtggtggtgtatgcctgtaatcctagctacttgggaggctgaggcaggagaatcacttgaaccagggagtcagaggttgctgtgagccgggaccgcgccactgcactccaggcaacagagagagactccgtctcaaaacaaacaaacaaacaaacaaacaaacaaacaaaagcattgccattccctgagaaggggaaaactttgtgaggagcacatgaaaagggaagatctggaatttggtttgggaaacgtaatgcttaatgtgcctgttagttgctcaagtggaaaggttaagtaggttatcaaataagtgagatgagtagcggataggttcaggccggggagatcaatttagaagccttcacatatttgtatgcttgcatgtatgtctaaagctatacaaggtcatgaaagtagacgagatcaccaagaaagtgagtttagatgaaatagtgatgaaagccaggtcctgaaccatggggcacttctaatttccatatctaagaaacagcaacagagatttagaatagatggctagagtataaaagagaaatgatgagagtgtaatgtgatagaaatcaagtgaaaaaacgttctagaggaggaggaaggtttcaactctgcccaaagctgctgacgtgtcaagtaagataagaacacataactgttaggttgagcaatgtgaaaatcattgatgattttgtgagaacagattaatggaaatgatgagcaaaaggtttgtcagaatgggagaatgagataagagaaattgatgacagtgagaaaagatcactctttcaaggagttttataaaaggggagtgtaaaagttttttgtttgttttccggagactgatggggtattaagggagaataattttctttataattgggaaaaaatatcatcataagacccactagagtgagaaaaaacagtgatacagctgagaggaaaaagttattggactgatgggcttgaggtgagaaatttctgtgcaagagaagtggggtgtgctttgtctataaacatggatctttcatccatatcctgatgaaaagagtcaaactctgtaaaatatttgaatagatttattctgagccacgtattaatgaccaatgtcctgtgccacagccccaggagatcctgagaacatgtgcccaaagtggttgggctacaccttggttctatacttcttagggagacatcagacattaatcaatatatgtaagatgtacattggtttcacctggaaagaaaggacaactggaagcaggggcttccaggccataggtggattcaaagattttctgattgtcaattggttgaaagagttgttatctgaagacctagaatcaatagaaaggaatgtctgggttaagataaaaagttgttgagaccaagattttatcatgcaggtgaagcctccaggtagcaggctactgcaggctacagagctcttatcagatctgaaaaggtgccagacccttagttaattctctcctggatcaaggaaaagaccaggaaagcaatggggattttctacagaatgtagattttccacccaaaagatggctttgcagggccatttcaaagtatgtcaaagaaatgtattttgggggtaaaatcttctatttctttcagggcctgctatctgtcatgtgatgctataccagaatcaggctggaatttggtgtcttattgctacagaaattttatttgattagtcttaatatctctgcttcaatgttaatgctggtcaactatgcctgaattccaaagggaggagtgtataagggagcgtgtctgatccccatttcccattatggtctgaactaatttttcaggttaactttggaatgcccttggccgagaggagggtccatcagttggttgggggtgcttagcattttattttcggtttacccatactatcaagaaggaaggcaggtaggtgagatgtgctggtaggagttagtgcaagtctcttctggaacttctattctcccactgaggaaggaaacatttgtccactgtccaaagttaggtgtcttattttcaactgacgtagccccagtcaagtaccttcttaaagccagactggtgctgcaatgccaaacaaacacaatgtatttgaaatactcaacatagggagaaaataagggcctatagaagtaatcaaagacacccgcagcaaagacatttatagcaacaacctgcagatgcttttttgacttggaacaagtgggattgtgaaaaagcacaaaaatacttggtcttcctgcagaaggtcttttgtattagagtcacctggtgcttagatttgcattcctctgatgctcgagtctgtgattctaaaaagaaagtttatttgcttgaggaaacactgttggatctttctggggagaacaggggttgcttcacaagccaaggtgttgacaatccccttcctgagagttgcagaacccaatccattgttgagggtatgctttgagagatcctcatcagctgtcttgcttgtggctttgcatggccttcatgtattcaatatccaacctcttcccctcttggtattcagatacattccccttcaagtaactgagatagtcaggttttgcatacctttgccaactttttgagagaggcttctccttatgctaattaatttaaaatcaacaatcaaatgatattttggagcatgttctccccttctgtattatcctatctttgagagcagggactgtcctcttatttttggcatctcttgaaggcccatcatatatagaataggcattgaaaaaattaatgaataggtaactttttcactttccccagacataattaaattttggctaagaaaggaatgcatatgcaaagtgccaaaggttaacagcaagcctgtttaaaacaatagcatatgttaactaattatgaaaagatattttttaatttaaaagtctaaaattatttttatggcagtttatgtttaattttacctgcctcacctctggcttagatgacagatttctattttaattatgtagctagtgattactacaaacatgttgaggctttttttttttctctttctctctggagattggaagtgagcagccattaggtattatcaagttctcctggaaatggtaatgatacgtggtcaaataactaatgcttgccaaatggctgaggctgacatgcttccccagagccttggtatataaggaatattaagcaggggaggaagtctctgggatgacacatgtaagtgtgagagtcaggctttgcatacctttgttttctgtccagcccatctgccaagagctaaattcactctttagcagttagattttgtggctcacaaagcacccttttgcttagtgttttaaaacaacaactgttttgttagtccatgattctgcaggtaggttagccatctggactgggctcagctgggtggttcttctggtcttgactaggatcacttatttgtctggggttggctgccaggttggctgagggctggctatttcaaaattacctccattaagattgctattttttgctctaaatgcctcttaccatccagttagattagacagagcagggttctaagaaagagcagaagcatgcaaatctctttaagaccaagactcagaagaggcatgctattacttttgtcgcattctattgatctaaggaagtctgagatccagtaacatttaaagggagggaaatagagtttatatcttgatgggaggagctagaaaatagtattgcaaaggacttggatacagggaggttgtttgcataatttagctaatctaccacaccagataaaatcttatttatttaaaagatctacatgtgcaaagtaagtccatcagttgagtctccagatgttgagaaccataaaccaatgtggattttgtgctagagtcagaagcagggcccagttttgctatgcaggatgaatgtactatttcttggagagggataatgagttattgcttcaggactgagagctctttctgctgatgtttgttaccagtttgaaggcagtaaagtctcatcaggaacaaaacaaaacaaaacaaaacagcatggtcaatgaatgccaaaaaaaaatctctacactaaattaggttcttctttatcagcatgtttttgtctctctagacatgtaatactccaagtcatcactgccttgtcctctgccaacctggacatagtcataagtatggtgctggcttatagttaaggtgctaggaaaaaaagttaagggtatttccatttttataggggtctattgaagttccaaagccttaatgggcgaaagacttaaagtcataatggtggaacgacaggcagaggttctaatgcctctgaaaagtgtactctatgtagcttctggataattcttctcctccttttctggctaagcatagaactgtctcttattgtcagtcctgaattcacatgagaggaatgctgtacaaggcattgccatatatatgaagtaaagggtaatgttggagatgatcactgttgtagggtgtccagtgctgtggtgccagcagtagcatcatgttgagatgtaataaatttggttttgtttttttctatccatctttttttggttcctgtcatttgtaagaggtagattttccagccttttcagcagttcctggagctacttgataataaaatccctctcactaataatcccctttgctaataaatctctcttctgctaagataaccagaatcgtttttagttgattacaacccaaagccctattgatttatttaaaaatgtttccctgtaagtatcctcaggctttcttagttcttagctcaaatatttagtttttggagaccaaggttgtgatgaaagttgcattaaaataggttcacaacaatcttttaatgtaagtgaatgagaagcagtggtgtccctcccagggctctttaccagacatatgcagcctgtccacagataatatttctactggctggtgaggcatcacaattttctttcctaccgctgaaccctcaactaaagatttaacctcggtactcagagccacttatgcctcccttttctaccagcccccatggaggcaactcacagccaataactagtttatatgagggtatatttgttctcagagagaacaaatcaatactgtgtcagagccctcagggatcaggccaaggctagactccagtggagaccatatccttgctcaactcctcctgccatcttgtttctctcattccttttctgatagcccttcctcaatgaacaatgtacacctgaaactctgctcaggcttttcttctgggaaactcagcccaggactacaggtttggatatgaaagataatatattaaatgtagagtctaattacagtagcaatggactccaaatgtcagtggcttaaaacactaaaagattatttcttgcttactatagatcaatgtacctttgtaggcaccaggaagtcagtcattcaaagacccaggctccttccatcttgtggctctagcttctctagcatcctctctcctcaggggaaagacaatgaggcttgcactagggccaaatttagagggaagtcctggaagtggcaaccttacttccacctgcattccgttaagcagaactcagacatgtgtgcaagggagactggtatatgttgtgtagctgtgtgctcaatcaggggagaagaccctacggaaggcctcaggctctacatataaaagatatggtgtgaggaagcagagctgtgaagctgcagtaattaaaaactcctttgcagaagaacaccccttgcccactgctcaggcaactatgttgactaaacaaagcctgtttttcagagcaaaagggtggaattttaataattaagcaagtacctagaggtaaaatgggattgttccaggtaaacaggatgtggagtcatcccaggtattgctgactcataggcagtcaagaaatggctgattcacaccacgtggataataaaaatattttaaatgtttccttgctagggaacatgtcacaaagctgtgttaaaggggaagagaaatagaatatagaatttggaaacttcacgagtcgtaactgcatccttccccaacccttcaaaatattcagagcctctgaagagtccatgttttcctccccaccagatgctccttcctgctttctcttctgtattcatttcccacagtggtgtgaagctgcacattaatatttctgtgaggcctttactgattcccttcagctgtctgtgaaaacttgggttgtgttgcagatctctgaggcccttctgatatggacattctctgattcaaaaagataaagaggctcagttgggacaagggaaagaacctagccattctgttaagagctgggggtctaagagtggagagaagcaatcagtgatgcactatgagtgacaggtggtctccaaagggagcagtggtggtggaccaagtggtggatcatttacagacgtgctcagggtaagcctggctcacctgaggaccctgtctaagaacctgaggaggggagggtgggaatggggcttatttgtttattctcaaaattcatatgttgaaatccaaacgctcaatgtgatgatgtttggaaatgggaacttgggaggtgattaggtcagaggttggacacccccatgaatgtgattcgtgcccttataagagaggccccagggagctgccttgcccctttcaccatgtgaggtttcatattaaaagaaaaaaaaaaaaaagaaagagagagagagaagggaggttttcacctgtctctctatctctctccaccatgtgaggatacagtaagaaggcacaatttgtaaacctggaagagggctcttctgaaacctgaccatgctggtactctgatctcaaactccctagactctagaattgtgaggaataaatctctgttgtttaagccacccagcctagggtatactgttatagcagcctaaactgacaaagacaggggcatttaggcctctataatctccaccagcatgttcccatttttattgatctccataatggatatgatggggcactgcccagatcccctcttcaggaaaatacctctaccctctactgtcaggaatttcagttgttgattgctcataccagggactctaccttgaaattacccttggcctcaagggactctctcatcatagttatgtctccttctagggcagctaggcaatgctgactaatgcaagaacacaagggcctggcccccttgcctcaaacagacaactgagaaagccaatgtagacttagagctcctggcagggttgtctaaggcctttgctgttagtgcagtgggggggtcagctttgctgtctgcccagtcccacctttctcactcttttgcaggtatatatcccaattgcagtcaccagaagactgtctgagcccacctccctgactctgtttctagaagatgtgaatgaagacaatctgagacataaaatctaaataagatgtttgtgctaggaacatgcaatttcaagcaaattctacagctccatttccaggccactgctacctagtctcctcccattcagacataccccccaagaatgggaaaggtctggaggggagaccagcaggggatgggaagcagctctccacgactctcttctctgctgctgctcttacattccctccccctttgccttctgtttatgctaattccaggtcttaaaatggctttttctttttcttctttgcaaggcacgtaacacttcatcattttcttctgtcatacgtttttggtttcctctgtctaactggaatttcctatatttaaagaaaagtcagaagctagtgtgtatgcgtgtgtatgtatgtgtttatctgtgtgagtgtatgtgcatcgtaacattatatagaagatcccttgtctttttggcacttggaactcagagcatctggcagacaaaacccgcaatatggtcaggcttcctgtctccctccagccacagtccccattgccttccaccttatgagttattcaggtacgttggtggccagtgtgcccctgtctatgattttgagattctctgagtccatgagcaccttctctcaatcactgcaatattctttaaagttctagagacctgggactctgaccacagactgagatcctagcttctaccccagattgccgtgggcacgaaacccacaggtggtttttcccctggaaggtgctcctaaccaagccatttcactgtggctagaacttgagacggtggtaatttgtgttactgaaagttgctaactcccaacccacgatgagccaaacaccctcacagtgtgatgatagaagatacacattcacacaccattttcagtctttcatggcttgttgcacaactgttaatcctatggtttcagtacttttgttcagagtctatctctgggatcacatatttaacatcttctttcaaggtgcacttcgtgttacacaagagtggtgttcctgaaaaagtgcttatgcattggcctttcttaagactgtggcattctctgaaacctctctgccctccagaaagttagaaaatgagttctaaagccccatgccatggttctgtgcatttctcgcactggcatgatcccctgtatatttcgttctgtgattttttttatgcaagccagtttggcctttccttgtttggatgcaaaatgtgattctttctccagattctaaaagaaatccaatcagacaaaatgcattgagggtgtagactctcactgtcccatgaggaaggcaggcaggcccagcatcctcttaacttcattcttgttccacttttttgtttagcgtttccttgcagcctttgtgtccctttcctaaaccccagtccccaaaagatgaccctggagggtcatctttgctgtctgctatcactgctgctgccttaggagaaaatagccttgcttgcgtttctgggctctatcttcatgtctgatcactttcttcaattaacaatggcatctaaagcttcaagttgtttttgtttttgtttttgtttctatgagtgcagcctctctgtcaagcttgaagcactttaaaaaaataatgaacacaggtgaactcgtttcaaggagtctccagtgaagagtcagtcagcccctctaggacaagacatctttcatattcatgcttacatctgcaccacctggtagagtacatggcacaagatggccattaattgagttgatggaattaaaaatgctacagaaaattatttcccaaagcaaagtatcttcttcaatgaggatgataagctctgttttcagtgcaattatcaatttgtgtttttgcatgtggggggtttcttaagtataataagatgaaatggacttaatcactaagaggtaactataaactaaacctttataaggcagttggctacagatttctctttggagaaaagaggctttacttggcaagcaacagtgggtcgggggcaacaaatctgttcttgtgtcatagacaaaattgtagaaggtatactgtgagctctaggcagcaagccaacattctttttactcctgatgcttaaaagctatgctttaatttttattttgtttccagtgccaatgctcctgggtcaatatgctaattcaaaagctagttgaatatatttgcatattgtgcatattcttgactccatagaggcagaattaaaattagagttctctacactttcactagtatggccttaaaattctacagaaaattccattctccttcattgttctcaaagtctttgaaattatggaaaagataatggtgttgggccattgtcagtttaatatagtcaatgtaactgaagaatgggttaccttgactagaattatttaatcgacagtgaccagataattttcattgttctggacctaatgtccagatacttaaatagggtagttgaccagaggaaccatgaacttgtaagaaaaaatgttacaataccttcattttattggaatttagcattccctttgataatgtatgtaggcaaacaactgcaatagtattggccatatctaggtctttgacatcgtagaaatcacagttattttaaaaacacattacaattgtttcaaatattttaaaatgtccttcccctaaacctgactttaaaatgttattattagactttccactgattcttattatttattgtactaataaagaagcacaaacattactgcatcataaatttatgtttttgatatttggattagtaaatttcactataattttgtttctactttgtacttctgtgcatttccctttgtgaatttaaagacattagcctgagggagtgtctatcatcttgtcaaatggctatcagggcccaagggacaggaaaggctgagaacttgaaattcacctaatacttgtcaataccaaacttttttttttcatctcttgtttaaccactgctcaagtcttgtcatctctttctcctcaataggaccctgctaaggatgtcagttatctgctgaatggctcctttccccatatgccccaggataatcgaaactcagcaaactatttctaatgagcagggagcttagccatggcttgatgctctgaaaaagagtcattatattttagaatgagcgtgagctttaaaaaatgtgggtaatcaagtctgatcacaccacgaaggctgctaaaaaacgcagtcctcgatttgggctcttataaatctcaaatcttttggaaagattctaaatttagaaccaccttttcaattccatcaggacagaagctgctttaaatgatgtgtcatccactgatgaaagagaaattggtatcattttcaacttaccatgtttggttcttgccggtgcaatgctgaggctggggagaatcgggcacgttgcagagtttggaggagccttgccctacttagagagaatatttaacacatgggagtgttggatgcactgactcagttcattagtggagattcaatgttatcgtactgttagtttttccagtctgaatttaggtgtattttgtttttggttttgttttttttggtttgtttttgttttgttttgtttttactgcagcaatgacagtaaaattttagtcgaagatttgctgaggaggaaacattgaaactattttctggaatccccaagtagtttggaggaatgggaggtttccctgttgtgagagtgtggatactgtcaccacactcaagcccaccagctgtcagatccttatccagttctgcggctctgcctctgttgtctgaaactggctgtctcagttgctgagtcatcacagtgctaagaaaccaaatccactgaaaatcaccctcggtgcccttgaatatttacccagcatattttgggagtcagaccagagccaagtagaagcctcaacagttaaataggcagcctctgcaggtataaatcccactctgcttgtgaaggtctctaaaccttcagcctccctcttcctccagcattctgtgtctgcaggctgctgcaaccctccccagtggctgatatggctgttcacgatgagcttaaagtcagtgtgcccttcagaggggatatctgtcagctgataccagctaataaaaagcatgtgtcataatgagttaaattcttaaggtgagctgctaggtaaaaccttggagctctcctggccagcctcccctccctcgctcccaccaccaatcacagaccaagccctgcctacttcacccactaaactttcttcaaagccccaccatctccttcatatcacctcctaactcacccaagctgccattgcattgcttctagctcagcattgtccaagatgtagtacctagccacatgtggctacctaaatattcttttcaaaatgaaggccagatcccatctcatggaggtgtttgatttgtcttggggtagcagaactccagctttattccagccacccttccctggctttctctgcctctaccacctactctcagtaactttgatcacttctgcctcaagcctctgcaaatctagcaccttctctccatcttctaaactgcaacatttgctgcacattgtagctctagtatcacttcctcagggaagctcaatttatatttgttgaaagaatgcctgaaacaacataagcaaatacatcaccagaggctgaataccaggcactggcatctaggtggaatctatcatcaggtatcagtggagaacagtcatttctctagatctggtttagaattagaacctttgttaggatgaaggtaaactggcaagggaggcctggggcagagcctactgtgcctccagccctgatatgaagacttctgggcttctttgtcctcacctctaataagatagttgatataggaggcagaatgctaagatgtctcccaaggtgtccactcctggtgcacacgctttgcataatccccaccacttcagggactgtgactcaaatgggatatctctctcatgattagactgttgattctgttgtatggcaagtgtaaagacgtttcacagaggcaattaagggcctaatcagctgatgttagttaataataaaaaattatgttgagagggctgatctagtaagttgagctcttctaagaggatttagaggccaaaaatagaagttagaaagaagccagctcctctggcctcatgtggagagattttgtgtgcagcctctagcggcttatagtctcagttctactgcagtcacaaggaactaaattctgcagacgtcctgaacaaacttgaaagaggaccctaagctccagatgagaaccctgactcagccaatatatttatttcagccttgtgagaccctgagcagagacccagctaagtaagctgtgtcctgactcccgacccacagaaactaggagataataaactgcggtgtttgaggtgcaaagtttgtggtgattttcctaatgcagcatcataaaacatacaatgggactcaagattcttaactcgttttgtgccatgggccacttgggaagtctggtgaagcctatggacttctgctcagaatgaattttaaatgcttaaaataaaatacaaagggttacaaaagaaactgcttttattgaaagagtaataacatattttttaaaaatgtatctgagttagtgtaacgtgtgcacttatttgttagcacattaaataataagatctagtggtaggtctaagagttactattatgtagaagaaataccgagtaaaaaccatcttctgagacagcaacagcaatagtgtgatgaaattacttgccatttctatgggtgtcaatgtcacacgattgctagtgcatttacagttggctgcttctattcatagtggaaggaaaggctaaatttcacataggagttggtaaaaataaagatttagcttttttttatacattcattcatttattcattcattcattccatccagtttatgccaccccgcattctatccaggttaaaaatctttagaaagttcctgagctgcttctgacttccacattctctgttggctttcatcttctgagtgatcccccgaaatttccatccagtggaaccaatgacattggactcttgtttacactcttaggagggccctccctcttgtttatccctagctcatttttctttaattacatgaattacttgatctgcatgtgtgattcatgtctttttgattatgtagaattaacctgaacagaacacagctgcgccaaggtaaattctgggtatatgtgtcccagtttttaagtccttgtgtcacaaatgccctcctgggaaaggtcaaagctcttaagtgtaatgttgaagccagggttgcaggctcagatccttctgtctacacctgcccatccctgaccccttcttgtttctgcagccccagtgtgggctggtgctcatgaaaacctgctccccagcccctgctgtctgcactgtaatagttataagcggatgttctctgctcttggctgagctgtaaatcaaacaatgcatgtttcctaatcatttctttacttctttctttattccttttttcaaaaactataagcatgtggctttaaaatttaaagtttacttacagcttataatacatttcttctttctcttgtgcccagctccttttactattttcttttcctctgttggttaccttcttaactttacataacttatctattatttattgatttattaactttacatgaagtctgttgactcactgttatgaaaaatgaggatttacctcactttactccacatctcccatggagcttgttttattgtttttgctgtattcttgcatttatcatacctctatttacatcaacattagcattgcatctgcccactggaccttctttcttttctatttcattttttgtcagatatatatgtgccttcatattgtcaagtttagcattatttgccttttcttcttaaaccaaaattgagtcttcttttcttcctccatggattaatattagaagttgaagatctgcaaagggcttttacctaactttgaccagtaacatattgttctatgtgggccaagtggtgaccaggtctcatttggtgacctccaggatcactggaagaagaaggtcctgaccatcaaggttaaatgattctcatgttgttcacaccatctagtaattaaaggcatgcctaatttttgtgtcttgttttttacattttagtaaacagtatgtgtggaggatgttttgtttgtttgatgtctctttgagttgtcaattacttctacatttttggttttcttgacaaattatagcatgtcttcagtctctaattttgaggaccctccctaaaacaattaaatcagaatttctgtggatggaactccaacacgggcttatcccaaattaaagtattcataaataaagataacattgaaccagatctacttgagggaggaaggacaatcactggaaagtatagattccacctaagatacatgatttcccaactcgggaaataaagagctcaatgggctggttccttggggaagcacatctaaatattttacatccaggaattaggaatagagctctatcttcagagagagtggcagagcatgtggttcacatcttgcctctctgtgtagttcaagcaggtacaagtgacaactcctggtcccatttcaaaggctttgtaatatttttaaataaattccttggtgatcaaaaatcaatactgtttagtctctatgaatctaataactcagggttcttcatttcgagtcagtgacacaatgccccattctttaggtgattcctgaatttcctctaaatactgtttggtaagaaaactcctagaacctgaatccacaccttcagttcagaactgaactaatggatttctttcctaaactcaattaatttctgttgctgaggcacagactttccactgtttggatctgaacaccactctctattttgtaaatgatccccaggctgaagtgaaacagaatggttaatgcatttttgatgaatattaaaaattcatgaaaaaaaataaaagtatgatacatatttaaaggagcctggttttggtttccttgccttaaagttattccctctctgatcctctctcccttatcctgcaaagaacatcataaaatgtccatgtctttctacattatggaaagtcattttgataagaatgcctttatgtctgtaaactgtcaggggtaaattgagcagaaaattatgcagtatcctggtaaaaccaaatgttaatatggaaattttcattaaatgccctaagaagctacagatgtttgagtaaattctactgattgctttggcctgacctctttttagtgcccctttgcacagtgtactgaaatccttcgacagatctcaccccatgttatcagtctcaaatcaggaagctttttcagaatagttggctatggcattaactcattttctccccaccttcttcctgcccccacaacagttctctgcagttctgtgagcagagaaatgcagcgaggccctccttcaataaatagcacatccattcaggtcactcatgcagctcattttaaataaattgaatcaattcatgcctattagctgcttgtccttgaactaagataacatgggatgttcaggtatcactcagaggaggaattatgagggtgacaaaatttgctgagtgctccaaggccaacttttataaaatcttgagtaggacaagggaagggaccttctattactcttaataaagtattatgtaaactattaacagtgtactatgcccttggagaaaagccttagaaacttagaacgtttgagcatatttttctatcgagttttatttgtgtaaaatgaatgaggcgccattgataatatttagaaactgcacatcccagatgactgggaatgccccatcgcttcccagggacatcatagggatatatcctcaacagaatcaacaaatcagtggaatcaatatgcttaattcaaatactgaagttatctgagaaatagattcatggtagattctaagatagtattgttctagaattttttttcctgtggctttaaatgcaggctgtcttcatttactcatttcagactttgcctttaccattattatggttcagcatgatttcaagtttctctccctttctagccacatgggatgatgtgattttattgcccctttcaagttagccatgaccatgagacttgtttggacagtgaaatatgtgcagatgtagtacctgcagcacttaattgctgatgcttgactactgagttttgtcattccctgtgacgatgataatggaagcagaggttgacatgcaggggccaaaagattgataccgcctgaaaggagagtggtcctgactcatggcccactcaagataagtgggaaataagtttgcattgtgctgagcccctgaaagttttgtttcctgcaatataaccttgcttatctttactaaagtaggcctcatgttctaattctcttgagtgaggccctccagggctactcttctttatggccagggcatttatattgattgtttttcatgaaagttccgagttgctttgtgaaatggactggcacttggaaagttgtgagctggagggtccagatgttgatctgccaacaacaaaaaagtgtacacttcatgagtttctctaattaatagagaggagccatatgatagaatcaaaatcaggctcagcacaaggttctcttgggatctctgcttgtgattattgaaggaaaagaatgcctcatttaattgacactaagcatttgttcttggctactccaactagctcgctctcacactgataatagcttataaggataacattgatatgagtagtggattcaaaaggcctgtgtgtggtatcagtttcaggtctccttagaaatatggcaactccacaacgtggatgccaagtttgttttcattaagtccaaaggaacaccatccacaggtatggggtaaaattgctcatctgtgctctgtctcatggctcagttctcacctatgaaatttgctaaattcaccaaaaggagtgaattattttaatagtccctacactgtaaattcctttaaaagtgggaatacactgaagaaaacagccctgttgtaataggcatgaacttttcatatttaaaaggccctatttctagaaacacttttcacatgtgaaaggttgggggaggggtatctattcggttgggtttcgaacagtgcttcatacattccttggtagaatgaaacactttcaaaatgtagttgcagtatgctacccaatcctccattatgttctttctcctatggcaaggaaatctttacttccctttgaagtggattcagtctcctaaagcatgatgtttttgaattaaatggctactgggaattaagtgggaaggaggataaagctgaaatattttgccagtgctgcatgaaggctaaagaagtaaattatcccaaatgaatgaagctttcatcggcactatttattgctgataaataggaaaatgtctgagctagagggcctctggtctcactaatttttatgaagccctcacacacagaggtgggaattcactcctcctttatttatttcctttcacttggctcaaattcctttgcaaaaattgactgatccaaagaggcgcaagtttcccttaatgtttaccctgtttaaaacaactactgtaatgactcagtctactctatgagtgcccttctgccgatattatgtctgactaatacatatagattgttcacaatttctcctgttccttgtattctaatgaattattattattattgttatcattattatttgagatacggtctcgctctgttgcccaggttggagtgcactagtgcgatcacggatcactgcagcctcaaccttctgggctaaagcaatcctcccactttagcctcccaagtagctagaactacagccatgtgccactacacctggctaattttctattttttatagagatgggggtctccctatgttgcccaggctggtattgaaatcctggactcaaatgatcctcctgccacagcctcccaaactactgggattacaggtatgagccactgcactcagcctactaaattattttcatggagatcatcttacctaaacttttcttccttagcataagaaattatcttgcagttgctggtctccttaatgtattaaagattcttgtgcttgatgattattagattgaaaatgctattttttgtaggtcaaaaatggttggatatcagaaattttgtatagttagaactttatttgctatggttagacattcaaggggaactttttttatttatttttcttattatactttaagttctggggtacatgtgcatagtgtggaggcttgttacataggtatacatgtgccatggtggtttgctacacccatgaactcgtcatctacattaggtatttctcctaatgctatcccttccctagcctcccatgccccgacaggccctggtgtgtgatgttctcctccctgtgtccacccgttctcattgttcaactcccccacctatgaatgagaacatgcggtgtttggtttcctgttcttgtgatagtttgctgagaatgatggtttccagctccatccatgtccctacaaaggatatgaactcatccattttgatggctacatagtattttatggtatatatgtgccacattttctttattcagtctatcattgatggggatttgggttggttccaagtctttgctattgcgtacattgccacaataaacataagtgtgcatgtgtctttatagtagaatgatttctaatcctttgggtatatacccagtaatgagattactgggtcaaatgatatttctagttataaatccttgaggaatcgccacactgtcttccacaatgtttgaactaatttatactcccaccaagtgtaaaagcgttgctatttctccacatcctctccagcatctgttgttacctgactttttaatgactgccattctaactggtgtgacatggtatctcattttggttttgattttcatttctctaatgactagtgatgataagcattttttcatgtttgttggctgcataaatgtcttcttttgagaagtgtctgttcatatccttcacccactttttgatgggattgtttgtttttttcttgtaaatttaagttctttgtagattctggatattagccctttgtcacatgcatagattgcaaaaattttctcccattctgtaggttgtctgttcactttgatgatagtttcttttgctgtgcagaagctctttagtttaattagatcccatttgtctattttgggttttgttgcctttgcttttggtgttttagtcatgaagtctttgcacatgcctgtgacctgaatggtattgcctaggttttcttctagggtttttatggttttaggtcttacatttaagtctttcgtccatcttgagttagtttttgtataaggtgtaaggaagggatccagtttcagctttctgcatatggctagccagttttcccaacatcatttattaaatagggaatcttttccccattgcttgtttttgtcaggtttgtcaaagatcagatggttgtagacgtgtggtgttatttctgaggcctctgttctgttccatcggtctatatatctgttttggtaccagtatcatgctgttttggttactgtagccttgtagtatagtttgaagtcaggtagcttgatgcctccagctttgttcttttgtcttaggattgtcttggctatgcgggctcttttttggttctatatgaaatttaaagtagttttttccaattctgtgaagaaagtcaatggtagcttgatgcggatagcattgaatctgtacattactttgagcagtatagccattttcatgatattgattcttcctacccatgagcatggactgttcttccacttgtttgtgtcctctcttatttcctggagcattggtttctagttctccttgaataggtccttcacatcccttgtaagttgtattccttgatattttattccctttgtagcaattgtgaatgggagttcattcatgatttggctctctgtttgcctactgttggtgtataggaatacttgtgatttttgcatattgattttgtatcctgggactttgctgaagttgcttatcagcttaaggagatttggggctgagatgatggggttttctaaatatacaatcatgtcatctgcaaacagagacaatttgacttcctcttttcctaactgaatatcctttatttctttctcttgcctgattgctctggccagaacttcccatgctatgttgaataggagtgatgagatagggcatccttgtcttgtgctggttttcaaagggaatgcttccagtttttgcccattcagtatgatattggctgtgggtttgtcataagtaactcttattattttgagataagttccatcaatacctagttcattgagagtttttagcatgaagagctgttgaattttgtcaaatgccttttctgcatctactgagataatcttgtggtttgtgtcattggttctgtttatgtgatggattacatttattgatttgcatatgttgaaccagccttgcatcccagggatgaacccaacttgatcatggtggataagctttttgatgtgctgctggatctggtttgccagtattttattgaggattttcacatcgatgttcatcaaggatattggcctaaaattttctttttttgttgtgtctctgccaggttttggtatcaggatgattctggcttcataaaatgagttagggaggattccctctttttctattgtttagaatagtttcagaaggaaagctcacctcctcttcgtacctctggtagaatttggctgtgaattcatctggtcctggacttttttggttggtaggctattaattactgcctcaatttcagaatctgttattgctctattcagggattcaacttcttcctggtttagtcttgggagggtgtatgtgtccaggaatttatccatttcttctagattttctagtttatttgtgtagaggtgtttatagtattctctgatggtagtttgtatttctgtgagatcagtgttgatatcccccttatcagtttttgttgtgtctatttgatttgtctctcttttcttctttattagtttggctagtggtctatgtattttgttgatcttttcaaaaaaccagctcctggcttcattgattttttttgaagggtttttcatgtctctatcttcttcagttctgctctgatcttagttatttcttgtcttctgctggcttttgaatttgtttgctcttgcttctgtagttcttttaattgtgatgttaggatgccagttttagatctttcctgctttcgcttgtgggcatctagtgctataaatttccctctacacactgctttaaatgtgttccagagattctggtatattgtgtctttgttctcactggtttcaaagaacatctttatttctgctttcattttgttatttacccagtagtcattcaggagcaggttgcccagtttccatatagttgtgcagttttgagtgagtttcttaatcctgagttcaaatttgattgcactgtctgtgcaataagtctgagagactggttgttatgatttccattcttttgcatttgctgaggagtgttttacttacaatgatatggtccattttagaataagtgcaatgtagtgctgagaagaaggtgaattctgttgatgtgggggtggagagttctgtcgatgtctattaggtctgcttggtccggagctgagttcaaggcctggatatccttgttaattttctgtctcattgatctgtctagtgttgacagtggggtgttaaagtctcccactattattgtgtgggagtctaagtctctttgtaagtcagtaagaacttgctttatgaatctgggtgctcctgtattgggtgcatatatatttaggatagttatctcttcttgtttcattgattcctttaccattatgtaatgcccctgtctcttttgatctttgttggcttaaagtctggtttatcagagactaggattgcaacccctgctttttttttgctttccatttgcttggtaaatattcttccatccctttatttttagcctatgtgtgtctttgcacgtgagatggatctcctgaatacagcacactggtaggtcttgactctttacccagtttgccagcttgtgacttttcattggagcatttagcccatttacatttaaggttaatattgttgtgtgaatttgatcttgtcattatgatgccagctggttattttgcccgttagttgatgcagtttcttcatagtgtcaatggtcttcataatttgtttttgtactggctggtaccagttgttcctttccatgtttagtacttccttcaggagctcatgtaaggcagacttggtggtgacaaaatctctcagcatttgcttgtctgtaaaggattttgtttctccttcacttatgaagcttagtttggctggatatgaaattctgggttgaaaattcttttctttaagaatgttgaatattggcctccactttcttctggcttgtagggtttctgtagagagatctgctgttagtctgatgagcttccctttctgggtaacacgacctttctctctggctgcccttaacattttttccttcatttcaaccttggtgaatctgatgattatgtgtcttggggttgctcttcttgaggaaaatatttgtgatgttctctgtatttccagaatttgaatgttggcctgccttgttaggttgaggaagttcaaggagaactttttaaactggctaatatatgtaaacaatctatcctttgtcattttattttctgttcatctacaaagagaacagaaaagagatctaaaggagcaacagcaagacaatctagaaaagtggcatgaggttcccgtgcactgcacatcactcacccaccttgatcctactccaggcccagggtaatgagaatgcagaggaaagcaaaggaaagatgacaggctacacttgagatctagccagccttggggaaaagcctctattctgatgggcattgcctccaaacaatgaaataaggacaaattctgccttctttaaagagtataacaatgaagtattttatacttttacatcaaagaagcaggacacatctgagacatccatgaacacacttgtcaagtaactgtaacctcccccttccacccctctaaataaatagaaaatacaaaaccacagcaatcacaaaccctcagaattctccaggtctcctttgacaacatgtctataaaaaagaaagaagagcatttagaagaaaacaaatcaagggaaattagaagccaggatgcctacctttcctccttgcctactctgctgtaagcactttaattgtgttagcttattaaatcttcccaaccctttacctggtggagaacattattccattttaccaagtgatatgatttggctgtgtcctcacccaaatctcatctgtaattgtagttcccataatccacacatgtggtgggagggacccagtgggaggtaattgaatcatggggacagtaacttccatgctgttctcatgatagtgagtgtgttctcatgaaagctgatggttttataaggggctttccccctctttactctgcatttctccttgctgccgccatgtgaataagaatgtggttgctttcccttctgccatgattgtacatttcctgaggcctcctcagccctgcagaactgtgaatcaattgaacctctttcctttgtaaattaccaagtcttgggtatttcttcatagccatgtgagaagagactaatatactgaggaagggtctgaggctgacagagaaaatatagcttgctccaaatggaagagcttgttaagtggcagaggatagactcaaagccaagggaagctaatgctgaagttacgcatcttctgacatgatacacaactgcctttgaggatggtggcaggcaggggattttatgggaatcaggaaagcgaagggttctacataagggcaggagcttgcccatccacaacttctctgacaatacatacattctgctcctatctttgagcctttctccagcacattaatgaagccatatatctgatggtctcactggggaagattgggagctgttgcagcaggtacattgtctaccatgccctgccattactctacctgactcaaattaccagatttccacgggaagagaacttaaaaggcacatgtgccctttgtaagagaaatgccataggcaaatgactccaaatacatagtcataggggaacaagcatagttttatggatcaggcagcactgccactaaatatttgtaagatattagacatctgaaaacggagatgattgtacctactttgtagaaatgcccctttatagtagttttcattttcttattttccttctggactcttttatacttaagaaagtgttggtaacccaaaataacttttgctttgttatatataggtaatatctgttaatattaaccagaaattaaaacatattttaaaaatatttattaatttttgaagttataatacaagtattacatgttaacataaataacatatatttcttaagaacaatagctatacattccagacaaactcagctagaaaagtgttttacaaatctctttaatgtctggtttaatataaaatagccataagcttggtgcagtggcccatgcctgtaatcttagcccttggggaggctgaggcaggaggattacttgagtctaggagtttgagactagcctggacaacataacaagatccccatctctactaaaaaataaaaaggaaaaattatccaggtatggtgtcatgcttctgtagtcccagctagtctagaggcctggaggctgagacaggagaattacttgagcccaggagttcaaggctgcagtgagctgtgatcatgccactgcagttcaacctggtctacagggagatctttctctataaaataaaaaataaaataagaatagccagattattttatctgcttctgcattcaatttgttgtaatacattacttgtttgggttaacaaatataaagaaaatccggcttcatacagatttatagttagaaaagagaggacttcatggagcccctgcaaggagactcccagggtctaggactagaatttgacaggagctgctctaaaaacaaacaaacaaacaaacaaacaaacaaaaagaatgcaaagtgagagtggcaagaggcagccaaatgcctaggcagatggggtgagcccccacctctaagttgaagacagtttaaagcctgaaagccaagctacaagttaaatccttggatgggattgagagcttgtcttcctatttggcatgctttcctctgattggtccccacccttcacctattttaaatatacctaccctttcctaattgctttttctatactgttgtgcccacctttgagtgatgacttcactttaaccttttttgcatactcacaaaccaaccagcacacactccctattctgagttcataaaaggctccagacccagtcacatgggggactttcccgaattcaggtagaattcaggtaggggaaccaccccctgtatcccttctttgctgagaactttcctttcacttaatagattctattctactcactctccggtgtccatgcgccgaattcttcctgattgtgagacaagaactcagacctaactaagctcaggagcagaaagaccacaacaaaaggatttactacagtgtcagaacacaaagagcagatattcactaaattgtatgagaaaatgttatcctcaaactttattgtacttacatacatgtgcctaaaaaatgtgtccagaagcatatcacagtgagagtagtagttgcaagtggataaacggaagcatacatacatgcaaacattcatgtacacaaggctctgaattcccttgacttcacttaagtcagaacatcagcaccactttgaaaattttaacaattaatagagtaatcaaaataaaaactaataagacctaaaattcttaatatgtaagcacagaactttaaatgaaactcatgcacatgcgttgattttagggataatatttagctaaatattatcttttgaaatcctgtaatcctcacaatactttcaggaataatttaacattatagggctagtaacccaaataccagaggtcacattagaattaacaaagaaatgtaaagttgattccttttttaagtgttgttttgatgctacataaaattacactgagttaatatttgttttgtttaaaaataaattaatgaccaataattcaaaacaatggaatttttaataatgactatatgccatgtagttgtttaataacattgtcaagttttaaattaggatttctatttcctttttttactaatagctttattagaatataattcacatactgtaaaattcaactatctaaagtattcaattcagtattagtaaattcagagttgtgaataaaataaaatgtatgttttctaactatttcccaaaacagcaaggacttaaaatattagggtgcctagttcttgatcttcgtttcagagtgtgtatattattacacccgttttaagacggtccaatgatgagaaattctgagcaccaaggctttaattttccccaagagtaaatcttcctgatttatgctaagattattttgtaggtaaattgatggatgatatcaagcttaatatattgacaaaattttatttgagacttcaacgctctaaagcttttttttaataacacagtcattgagttacaattaactaaattaaaaactttttccaagataagcaaatttaaaaatgatgaaaggagaagcaaaacttcattaggtttaagtaaaacttaatttatttttctcctcactactttttattttgtatgtcttttttttcttttcccagataactttattgccttaaactctttaggtcaagttttctgttttgttttgttttgttttgttttgtttgtatatttgcatccagtccagtttccattaagaaagttaatttttattattatttattttttctgagacagaatcttgctttgtcacccaggctggagtgcagcagcgcaatctcagtttgctgcaacctccacctcctgggttcaagcaattctcgtgcctcagccttgccactagctgggattacaggcacacaccaccacacctggctaatttttgtatttttagtagagacagggtttcgccatgttggccgggctggtctcgaactcctggcctcaagcaatccgcctgcctcggcctcccaaactgttaggattacaggcatgagccactacacctggccaccattaagaaagttgatatatatttatccgttcaaggtaagggtcattattttaaaatgtctattaaatggatttagcaagcaacctgaaggtaaccagactgtgggtacatttgaggtgatattgatatatttagcgaaattgtgttaactggtatatcttcacttaaattttggcaaaatattacccttctttccattggtactggggaccccagggagtactgcaaaatggtcatggaatgggcctggaatcacacagcttacttacctgaattactctccgcctcctctaccccatgcctttactgctctgtaatgaactgctggtcagtggccaatctctatcaactgcatagctctttctcaggctgcttatacccttgtttcttctgtgtactggttacaaaatcattcttcccctcttgggttcattgctgcttggaatatttcagagttcatgagggctgttcttttatccaagccatttcctccactaggttctcatgtgacggtaactcactgggcccctcagactctaccactgggtccagctggctgctggctcatatcccttagcatgagtgccttctctccatccctcagccccatctccatcttgtaccccaccccccagcatgctgcccacctcaaccacaagctcactagttgcagacactgcttgggtgcctgaaggaaaaggccttccttcttgtatttcaaaggagccacatgaatttcatgccattcagcgactccctgaaaatagaatcttaagtggtttttcctaaattcgcacaggaagtatgctagaggcccaattacagcccagcctaggccactttaataggatctggagaagagtttgagtgacataggcaccaagactggctggctatataaccaagaagatttggtggaatgtcagctgcagagatggacatctggatatctctcccctgctgtaacacttcaatattgaatgatatttggcacaatccctgagttggcaagcgtgttatctgcttgcaccagggacacctggcttaacagaggcatttgcagtgctgccacagcattaaatttgtttgcggtacttaaaagtattttaatataaactatgtcatgggatatggggtcctgccaattcgataattgaatgggaggtgttgggggtttatctttattttaacaaaaccaaatccctttcaaaaagtctatttctttttcccagtatgagcaaaacatcatattatgaggtacctttcagaagcggacaatccagtcatttttgattcatgcctctagctggtgtcccactctcttacacatccctggtgttgtcattacccatgggaaaggtagaactgccaccacaatttcaaatctgaattgcttcttttggttgcttacaactataaggttagcatattattatctggcaccgctattcaaaactggcagaggcaacaacaacaatgaaaagaaagattcatggcaaaaataatgcaaggcagacatctttctacatctcttcctcatttttacacagaagatatttataggtgaagaaaattctcaagagaatgtatattcaaactatttttaaagtagcatttacaaatttaatttattcctcttacattggcttttaattttaagcagcaacatttgaagggtgtttgaatatacatccccatacattgctgctgaagacacctgaggatgtcattttatcgagcacacttgagagccaaactctgtcctgggtgctggggaactcagtagtgactcatacagatggggtaccttccttgcggggtcagagagaaatgataaacacacaatctaacaagtccaaaagaagattatcaggtaggtttgagcaccatgaagattgaagtctttcaaagcagctccccagacagtgtctggagttgaatccaagcattcagtaagaggcacatgtggcgtagaagaaaacttggtattctgtaggcaaaggcctggaatttccttccaggtggtatgatgcaaagcgtggcctgtttcccttaggaggccagttcccatcagttccttggcattgaacccatcctttccacatcttgcatctcaactggcagctgaacagattctgtgggaatgtcagggtggggtactggggaggatgccatcttagagactaaatacataaaggcttgccacattttaccaccacactttaactagcttaaaggtaatttgaagagtttcttttagaaaatataaagtgaaaaagcgttgcctgtttctaatcattaaaggctttcaactccaacagcgaggaaaaagtcattttcaatgcatttgtaaatggaatgacccaatcgggaacagctactcttttaactaccccttatttccatttctttgctatcctaatacactttcctcctcccacggacaattgatgggaagtaattacctaaaattgtccttattctttatatatttgtctttcctataaaatattatccaggtatatcctcaagccagctcattcccttcactttgtaccttgcttacacaactttgctctgcaattcggtcctcacccaaagcaacagcagatgagttatcaatcagggaaacacttgaagccacattccagttgatcttgttgacacattagccattgtaatggggtgaatggtggtcttcccaaaacgtatgtccacatcttaaatcccagaacctgtgactgtgaactcatttgggaaaaaaacaagtcttggcagatatgattaagctaaggatctcaagatgaaattgtctattatccagtcacaagtgtccctataagagacacacagagaagaggaggagacaatgtcatgatgaaggcagagatcggagtgatgtagccacaagactaggaatgccaatagctaccagaagcaggaagaggcaagagacagactgttgcttcagtctttgccaacaacttgattttgaacttttggcctccaggactgccagagaataaatctctgttgttgtcagccaccaagtgcgtggtaatttgttatggcagccctagaaactaacacagtcattgtgagttatataaactccacaaaggcagggcataagtgataccctggtgtgtgcatcctacaaacagaaacgactgaattggtgtgatttgatcaggtctgcttgagaatggagcaaagtcaaaaaagcatctgttacagaaattacagaaatagccatatttctagtatctgtgtagcatcttaagccaaacagggatagatatttatctttctctattagaagaaaagaaaatgacagattttttttgagagccgttcagttaggtgacaccagccatatcacaaggatttgaatgcaaaccaggaaattaaataagccggttaacacctatgtctttcctggaaatgttcctctcttccttcatagaaatgttcttatacataaaactcaatttctcagcccagcgcttagtccatctcagactgattaatcagcacaaaaatgctgtgtggattaactgttcccttcttgctgaagaaaaagcgactttcaaaatctcttgcatctgagcagccataaatttcttgcattgccagagaacggcacaggccaactgcagggagtgggttgtttatttctccaaatactgatgaaaggctgttgtttcatggtaattcagcttcaaaatttctggagaaaagattccctcccacccctcagtaataaaacagtgttgctgggaagatgcaaagacactaaaagaaacattcatcaaggtatagatgctctgtcatgaaaacaaaatatgccaagccagtgtcactgaatcttaagatgctgtttgatcttcccctcccttctttgatggttgtgtccgggataggctatgttctcagttaaaggcggcctcctgccgactgctataaagagacatatgtaataaaatgagagttcctccttcctctctcattattttggaacacaattcagttccactctgggctcttgtagaaccccaagacttgtttggggtttaaagatcaggcaaataacacagctcaagaattacctttggaggcacagaatccagtcatcttctgttaaccaggttctggtgggggcagcaataaagtaggatcttgctaaagaagctccaagaaagccaccattactatggtttattttaaatgtttattataatgtatactctcagaatctattgatgaaggtgatagcacagattaatacctttactacattctgaggttttgaccttattggaagaaaaccctccttaaagctagtagaactagactctgaagccagcagaataacttgaagatatttcaggattgaatgcaagtgttatactctcagcagaaccgccctaggaagctagcaattttggagaggaattcacacactcaataccattttaaaaattcatttattccataataaaaaatggtccacccaccattaaacagaagtacatgtggactatgaaaggcccagaaaagtgtaacataaattcccatcttctatactgtacaatctattagagaataactggtgtactttccaggaaagttttaaaacattactaaagcgcccactaagtagcacctagtaattgtccaataagtaaaacatataataaattatgtatttatggatacaaaagttgtgacaagatgagatgatttggtaaagcagaaggaatctgggatttgcttcaggcaacctgaaatcacctgtttttttttttttattttattttttttttttgcctcttactactctaactagctactataagtccagggccagtaggttaacaacttctgtgagcttcaacttcatcagaatgtctatgccagaatcttaaggtatatggcaaattacaaacagtgcatatgcaacatctcacaggtaataggtgctcacatgtggtgttgcttcgttattattgctttttccctcctataattcacaatttactaaaagggaagacccaaatggttggtaaattctgatggattatcttaggaaaaataattatagcaataaggtattccaacagagggctgaattggccaacaagactgccaagttgcagacttacttaccacagatctggtggtattcatcactggacccccagttgaggtctcagggccttacatggaaaactccttaccccaaatccagactttaaaattctattcataataatagtgagaactcttctaattggattggaagtgatttataatagcactaaaaataaaatttcaaattaaaacccaaaaggaactatagaaagaagaggaagcaaatatagcagcctccttggttgatatgttaattatggttaagcattaaattagctctaagcttcctggcacccaggggaacaatggaaacacggcaggttatataattttcagtgactaataaaaatgacccagggagtcttcctggagattaagttctaagatttaaaaggtgtgaccatcaaggaataagaataaatttgcaagttgcgttcaaaaatatgctttatctctttgtttcacagttggggcatctagcaacagttggaggtgaggtagaaaaatgtacaccgggtggatataacctttagggcatatgactcaggaagaaacctgggaagatacagatgtgtgtatcagggaatgaaaataaatatgaacggcattagcatatgtgagataaatggaaaatggaggaaaaaacagggcaaggaaatctttctagagtggcttctatgtagaagagcttcataaaagcatccgatgtgaacagcagtaaaaattcaggaaataagatgaggttaaggacattgccctggatgttatatttaagttagaatgcctaagctggttttataacagaatggattgagaaaaaccactggttaaagtctgggcgaatgcaagaaaattttgacccactaatgtagatagatctgagctcatccaagaaaggaatcttcttcctcaacgaccaaagaaagtgagcaaaataatttttgtcttggccaagaaatagtgagggcctaggagactggttaatgctttagttcatatgctaaaattgcttcctatattataaactattttgccatttaataagtagaaatacggtcttagaaaagtaacaagatggtcagatttttacaagaaaaaatatatacgaaaaaaaaatcccaaaggaaaaattgtgactaataatgtaaccccattgttacattgggtagaaatggtgaaaaatcacctagtatggaagatgcactatgaggaaaaagaaaacaaaccaattaggtggtagtctcatttaattttagttctcatttgtgaaagggtaaaggtatcccacatgaatggatcctcctttaagacagatttctaccttgactatttattggaatcatctgaagagccttgaaagatttataaggcagatccatctcattttctgggataggatctaagcaccagtattcagaaatttccctaggtgattccagtgggcagccgaggctgagctttaaggggttaactagtaaagcagagaaggattacaaggaaggataggtaatgaagagtctggctgactgaaaatcacaatcgcctccagaggtggagtctgtttcctccttcctagaatctggactggccctgttatgtattttggccaacagaatgtgctagaactgacatgaagtgagtctcaggatagcgtgtgtcttccaccttttggaatatcccttttactatgtatgaaagcctgagggatgggcacggtgcctcgtgcctgtaatccaagcactttcggaggcagaggcaggagaatggtttgaagccaggagtttcagaccagcttaggcaaaaaaagtgagaccccatatctattaaaaatatactttttaaagttagctgagtatggtgacgtatgcttgtagtcccagctacttaggaggctaaggcaggaagatcacttcagcccaggaggttgaggctgcagtgagctaggatcacatcactgcactcaagcctgggtgacagagtgagaccctgtttccaaaataaaaatcctgaggtggatgattgaatgagagaccacagagagatgctacaccaatagtcagcactaacctccagacgtgcaaatggaatcatcttggaccatccaatcacagtcaagcccccaccgttaagtccctagctaacacctcatgaaacagaggcaacccattccaactgaccctggtccaattgcccacctccagaattaagacaagtaataagtgattgttgttgtaagccactacattttgggatagtttgttatgcagtaatcaatacaaagatagaaagagaacacaaaacaaaacaaaacttcttgaagctggactgtcaaacaaatctgcaacagctagccttcaggatggtcctcaaagatctccatgccctggtattcaagttcctgtgtcatgcattcaaacattttactagcattggtctgtgtgaccaatagaatatggcatagttatgatataagacttctgaggctagatcagaaaactcacgtggcttctgctttgctctctttcttgcacaaggaagccagcaactatgttatgagggtgccatagccccgtacaggaaatcctatatggtgagaacctgtgttatccagtcaacagccatgtgagtgcaccattttgcaaacttattctccagtcccagtcaagctttcagatgaatgcagctcttgccaagattctgactgcaactccataagagacctgagcaagagtcactcacctaagctgctcccaaattccttacccacataagctgtaagaaaataaatactttttgttggtttattttaagtcaccaaattttagggtcatttgttatgcaaccataaataaccaatgcatagcctttgtttctgaatgaattgcacctggtgaaataggtccaatgtgtaagtacatgaggaggatgaggaaaattcagtatctagaattaaagttcaaggtacgtggtcaatagcattgtggtgaaatagataagcagtgctttgtaacctggggaaatgaaaaagggtgtctctcttaggagtacagagcgaatgataatcttgtttgggagcaggattcagtcctctttgaggtgaaaatgtgccactacatggggattcagtaccttcagttgtaaagattggaaaactgcaggttggtagactgatcattacacacatttccagggaactgcagaaaccacttacaagtgagaaaaatcgtagaaattcatgttaacaggtgataaagagaaatgcattatttctggagcaagtgctagctaaggaccaaagtaacaaaagaaagagagttgggaaaatgaggagacagcctatgcaacagaaccaggctggagaaaaagaaaacagaagtcataaataaggaaaatgagtatgtaagtgtatttttaaagttttaggagagtttttattctttttaaactgctgtaactataaccaagcatgtcacagtccaataatggtgtcaatctaagaaagaggaatcactatagtagctattgtctttaagtctaaagtccacctgaacttatggtaataaaaaatgatcagaaaaatttcttcacttggcttactgagcaatgtctttgctcttccttttcttttaaataactttttattatagaaaaaaatttaaatatgcaaaactagagtgaataataatgaacctccatctaattagtatccactatcaacaattatcaagcatttccacacctctaccattgcgcattcatactcatactcactgctcctcccatttcatcccattttagactgcttttatataaatctcagttattgtatcatcttaaatatgtcagataaggactctatttaaaacataatcaaaatatcattactacccctgaagaaatgataataatatcttaacattagccaatcaccaggattaaaatttgtttgattgtttaatatttttaaaacgtttgtttgtgcaaatcaagatccaaaggtggtccttatattacatttgttgtgctatatctcttaagtctcttgcaatgtgtagtttcctcatcatctcttttgtttctttgaaacacatcttaaagaaactgggagtttgaccagtagaattcttcatagcagcattttgatgattgtttctttagggtgtgttttaacacgttcttctgttttctgtagtacctgtactttttttaaaaatttattattattatactttaagttttagggtacatgtgcacaatgtgctggttaattacatatgtatacatgtgccatgctggttacctgtacttttttaaattttcctctcttttttttttttttttttttccagacagagtctcaggctggagtgcggtggcagtggcataatctcaactcactacaacctccccatccagggttcaagcggttcctctacctcagcctcctgagtagctgggactacaggtgcttaccctcatgcccagctaatttttttttgtatttttaatatagacagggtttcaccatgttggccaggctggtctcatctcctggcctcaagcatcttggcctcccaaagtgctgggattacaggcgtgagccagtgtgccctgccgcttgtacatttttttattagatctagggtcatgatcaaattcatgtttgatatttttgacaaaagtacttcacaggtgatatttctctcttcatgagtgatccaaaaatatctgattatcttcctttttgttttcaaaggatattaaatctataatttgttatagattataaaatggtaatattctaattctataatttctccaaaaaattttctcatatcaactcttaggatgcataacagtttgtatagcaaaggtggaataaatgtttatttttgtttatcaattttccaaacaatagaagcaatttgtaaacaaattgcttcctagcatcttccagatatgaagactacatttattggtatttttaggaactcataaatttaaatatatttgatgtttttcagttcatttgaattattattcacattgatattcaaactgttcccctactggccaaactgttcctttgaagttagtctctatatccatttgacatgatacaaatcatgtttgataacttttttccatttgttttctttttaactttttattttgaaataattatagactcacatgaagctgagaaaaaaaaaaacccaaagctttaccagcttcacacagtagtaacatcttacatagctatagtatattatctaaacctggaaattgacattggcacaatgcaactaattagactatagcacttaattgaatttcactactgtacatatgcacttgtgtgtgtgtgtgtgtgtgtgtgtgtgtgtgtgttgttctatgacattttattaaatgtatagatttgtataaccaccaacacattttgtaacttctttgctttctggtataacatgaaattctacaagtatcttttacatttcctgtcttaggccttaggtcagccatttcttcaagatgtcatggttagttatagtggggcatgctacgcagaaaccatagaatggagtctatttcctttctaaaaacccaataaaaaatgggtttttatttcctttggcttgaccatggtttctagaactgctcagtggacaacgttgtggaaaaccttaaaaaccacatacatcatgtcttctaattgataattccaagtcaaattcagtattatagaggttttacttaatctcaacaacattatatttctattttcttcatcctgtgccaaaaaaaaatctcatttctcaatcccatcaagataattatcaattcactttattttacaggactaacagaacattaccagagtagtaatgccatcgctactaccaaaaccattattatttaaaacaggctaagctttaaaaaattgttttatttgtacataggatagatcccaacagtgatgtacaattcaaaagttactctgaacagttcctttctgtacagttacattggaagcttgatgcacaatttgttgcatttgttttttttttttttttttttttttttgcttctagggttttttcttttaaattattattatactttaagttttagggtacatgtgcaccttgtgcaggttagttacatatgtatacatgtgccatgctggtgcactgcacccactaactcgtcatccagcattaggtatatctcccaatgctatccctcccccctccccccaccccacaacagtccccagagtgtgatattccccttcctgtgtccatgtgatctcattgctcaattcccacctatgagtgagaatatgcggtgtttggttttttgttcttgtgatagtttactgagaatgatgatttccaatttcatccatgtccctacaaaggacatgaactcatcatttttatggctgcatagtattccatggtgtatatatgccacattttcttaatccagtctatcattgttggacatctgggttggttccaagtgaataatgccacaataaacatacgtgtgcatgtgtctttatagcagcatcatttatagtcctttgggtatatacccagtaatgggatggctgggtcaaatggtatttccagttctagatccctgaggaatcgccacactgacttccacaatggttgaactagtttacagtcccaccaacagtgtaaaagtggtcctatttctccacatcctctccagcacctgttgtttcctgactttttaatgattgccattctaactggtgtgagatggtatctcattgtggttttgatttgcatttctctgatggccagtgatgatgagcatttttccatgtgttttttggctacaaaaatgtcttcttttgagaagtgtctgttcatgtcctttgcccactttttgatggggttgtttgtttttttcttgtaaatttgtttgagttcattgtagattctggatattagccctttgtcagatgagtaggttgcgaaaattttctcccattttgtaggttgcctgttcactctgatggtagtttcttttgctgtgcagaagctcttgagtttaattagatcccatttgtcaattttggcttttgttgccattgcttttggtgttttagacatgaagtccttgcccatgcatatgtcctgaatggtaatgcctaggttttcttctagggtttttatggttttgggtctaacgtttaagtgtttaatccatcttgaattgatttttgtataaggtgtaaggaagggatccagtttcagctttctacatatggctagccagttttgccagcaccatttattaaatagggaatcctttccccattgctcgtttttctcaggtttgtcaaagatcagatagttgtagatacgcggcgttatttctgagggctctgttctgttccattgatctatatctctgttttggtacccgtaccatgctgttttggttactgtagccttgtagtatagtttgaagtcaggtagcgtgatgcctccagctttgttcttttggcttaggattgacttggcgatgtgggctcttttttggttccatatgaactttaaagtagttttttccaattctgtgaagaaaggcattggtagcttgatggggatggcattgaatctgtaaattaccttgggcagtatggccattttcacgatattgattcttcctacccatgagcatggaatgttcttccatttgtttggatcctcttttatttccttgagcagtggtttatagttctccttgaagaggtccttcacatcccttgtaagttggattcctaggtattttattctctttgaagcagttgtgaatgggagttcactcatgatttggctctctgtttgtctgttattggtgtataagaatgcttgtgatttctgcacattgattttgtatcctgagactttgctgaagttgcttatcagcttaaggagattttgggctgagacaatggggttttctagatatacaatcatgttatctgcaaacagggacaatttgacttcctcttttcctaattgaataccctttatttccttctcctgcctaattgccctggccagaacttccaacactatgttgaatagaagtggtgagagagggcatccctgtcttgtgccagttttcaaagggaatgcttccagtttttgcccattcagtatgatattggctgtgggtttgtcatagatagctcttattattttgaaatatgtcccatcaatacctaatttattgagtttttagcatgaagggttgttgaattttgtcaaaggctttttctgcatctattgagataatcatgtggtttttgtctttggctctgtttatatgctggattacatttattgatttgcgtatattgaaccagccttgcatcccagggatgaagcccacttgatcatggtggataagctttttgatgtgctgctggatttggtttgccagtattttattgaggatttttgcatgaatgttcatcaagtatattggtctaaaattctcttttttggttgtgtctctgcctggctttggtatcagaatgatgccggcctcataaaatgagttagggaggattccctctttttatattgattggaatagtttcagaaggaatggtaccagctcctccttgtacctctggtagaattcggctgtgaatccatctggtcctggactctttttggttggtaaactattgatttttgccacaatttccgctcctgttattggtctattcagagattcaacttcttcctggtttagtcttgggagagtgtatgtgttgaggaatttatccatttcttctagattttctagtttatttgcctagaggtgtttgtagtattctctgatggtagtttgtatttctgtgggatcggtggtgatatcccctttatcattttttattgcgtctatttgattaatctctcttttcttctttattagtcttgctagtggtctatcaattttgttgatcctttcaaaaaaccagctcctggattcattaattttttgaagggttttttgtgtctctatttccttcagttctgctctcattttagttatttcttgccttctgatagcttttgaatgtgtttgctcttgcttttctagttcttttaattgtgatgttagggtgtcaattttggatctttcctgctttctcttgtgggcatttagtgctataaatttccctctacacactgctttgaatgcgtcccagagattctggtatgttgtgtctttgttctccttggtttcaaagaacatctttatttctgccttcatttcgttatgtacccagtagtcattcaggagcaggttgttcagtttccatgtagttgagcggttttgagtgagattcttaatcctgagttctagtttgattgcactgtggtctgagagatagtttgttataatttctgttgttttacatttgctgaggagagctttacttccaagtatgtggtcaattttggaataggtgtggtgtgctgctgaaaaaaatgtatattctgttgatttggggtggagagttctgtagatgtctattaggtctgcttggtgcagagctgagttcaattcctgagtatccttgttgactttcagtctcattgatctgtctaatgttgacagtgggttgttacagtctcccattattaatgtgtaggagtctaagtctctttgtaggtcactcaggacttgctttatgaatctgggtgctcctgtattgggtgcatatatatttaggatagttagctcttcttgttgaattggccattacataatggtaaagggatcttctttgtgtcttttgatcttggttggtttaaagtctgttttatcagagactaggattgcaacccctgcctttttttgttttccatttgcttggtagatcttcctccattcttttattttaagcctatgtgtgtctccgcacgtgagatgggtttcctgaatacagcacactgatgggtcttgactctttatccaatttgccagtctgtgtcttttaattggagcatttagtccatttacatttaaagttaatattgttatgtgtgaatttgatcctgtcattatgatgttagctggttattttactcgtcagttgatgcagtttcttcctagtctcgatggtctttacattttggcatgattttgcagcggctggtaccggttgttcctttccatgtttagcgcttccttcaggagctcttttacggcaggcctggtggtgacaaaatctctcagcatttgcttgtctgtaaagtattttatttctccttcacttatgaagcttagtttggctggatatgaaattctgggttgaaaattcttttctttaagaatgttgaatattggcccccactctcttctggcttgtagggtttctgccgagagatccgttgttagtctgatgggcttccctttgagggtagcctttctctctggctgcccttaacattttttccttcatttcaactttggtgaatcggacaattatgtgtcttggagttgctcttctcgagtagtatctttgtggcattctctgtatttcctgaatctgaacgttggcctgccttgctagattggggaagttctcctggataatatcctgcagcgtgttttccaacttggttccattctccccatcactttcaggtacaccaatcagacgtagatttggtcttttcacatagtcccatatttcttggaggcttcactcatttctttttattcttttttctctaaacttcccttctcacttcatttcattcatttcaccttccattgctgataccctttcttccagttgatcgcatcggctcctgaggcttctgcattcttcacgtagttcttgagcctggttttcagctccatcagctcctttaagcacttctctgtattggttattctagttatacattcttctaaatttttttcaaaattttcaacttctttgcctttggtttgaatgtcctcccgtagctcagagtaatttgatcgtctgaagccttcttctctcagctcgtcaaagtcattctccatccagctttgttccgttgctggtgaggaactgtgttcctttggaggaggagaggcgctctgctttttagagtttccagtttttcttttctgttttttccccatctttgtggttttatctacttttggtctttgatgatggtgatgtacagatgggtttctggtgtggatgtcctttctgtttgttagttttccttctaacagacaggaccctcagctgcaggtctgttggaataccctgccttgtgaggtgtcagtgtgcccctgctggggggtgcctcccagttaggctgctcgggggtcaggggtcagggacccacttgaggaggcagtctgcccgttctcagatatccagctgcgtgctgggagaaccactgctctcttcaaagctgtcagacagggacatttaagtccacagaggttactgctgtctttttgtttgtctgtgccctgcccccagaggtggagcctacagaggcaggcaggcctccttgagctgtggtgggctccacccagttcgagcttcctggctgctttgtttacctaaccaagcctgggcaatggcgggcgcccctcccccagcctcactgcagccttgcagtttgatctcagactgctgtgctagcaatcagggagactccgtggcataggaccctccgagccaggtgcggggtataatctcatggtgcgccgttttttaagcctgctggaaagcgcagtatttgggtgggagtgacccgattttcaaggtgcgtctgtcacccctttctttgacttggaaggggaactccctgaccccttgcacttcccgagtgaggcaatgcctcgccctgcttcggctcgcgcacggtgtgcgcacccactgacctgcgcccactgtctggcactccctagtgagttgaacccggtacctcagatggaaatgcagaaatcaccgtcttctgcgtcgcttacactgggagctgtagaccaaagctgttcctattcggccatcttggctcccccccccgcatttgttttattttactttcaaattgtggaaactgcttgtaagtctcaattgcatttaatagaaatgtaaaatacttacctaattacaaagccaatttataaaataaggtatatgcagagtgatatggtttgactatgtccccacccaaatctcatcttgaattcccacatgttgtgggggggccctggtgggaggtagttgaatgatgggggcaggtctttcccatggttttctcgtgatagtgaataagtctcatgagacctgatggttttaaaaatgggactttccctgcacaagctctctctgcctgctgccatccatgtgagatgtgacttgttcctgcttgactttcaccattgaggcttccccagccacatagaactgtaagtccgttaaaactctttcttttgcaaattgccaagtcttgggtatgtctttatcagcagtgtgaaaagtgactaattaccagtatagtggggtgctgctgtagatacccgaaaatgtggaagcaactttggaactgggtaacaggtagagtttggaacagtttggagggatcggaagaagacaggaaaatgtgggaaagttcggagcttcctagagacttgttgaatgactttgacaaaaatgatgattataaaatggacaataaaatccaggctgaggtgggttcagttggagataaggaacttgttgggaactggagcaaagatgactcttgttatgttttatcaaacagactggtggcattttgcccatgccctagagatttgtggaactttgagcttgagacagatgttttaggatatctggcagaagaaatttctaagaagcaaaacattcaagaggagacatgggtgctgttaaaggcattcagttttataagcaaaacagagcagaaaagttcagaaaatttgaagcctgatgatgtagtaaaaaagaatattccggccgggcgcggtggctcacgcctgtaatcccagcactttgggaggccgaggcgggcggatcacgaggtcaggagatcgagaccatcctggctaaaatggtgaaaccctgtctctactaaaaatacaaaaaaattagccgggtgtagtggcgggcgcctgtagtcccagctacttgggaggctgaggcaggagaatggcgtgaacccgggaggcggagcttgcagtgagccgagatcccaccactgcactccagcctgggcgacagagcgagactccatctcaaaaaaaaaaaaaaaaaaaaaaaaaaaattccatattctgaggagaaattcaagctggctgcagaaatttgcataagtaatgaggagcagaatgttaatcctcaagacaatggggaaaatatctccaggtcatgtcagagaccttcatggtagaccttaccatcacaggccccagaggcctaggaggaagaagtgggtttgtcggccaggcccagggtccctgtactatatgcagtctagggacttggtgccctgcatcccagatgctccagcaccaaagggaccaatggctaaaaggggccaagagctagagctgtggtttcagagggtgcaagccccaagccttggcagctttcatgtggtgttgagcctgtgagtgcgtagaagtcaaaaattggggtttgggaacctttgcctaggtttctgaagatgtatggaaatgcctggatgcccaggcagaattttgctgcaggggtggggccctcatggagaacctctgctagggcagtgtggaaggaaaatgtggggtcagagcccccacacagtgtccctagtggggcactgcctagtggagctgtgagatgagggccaccatcctccaaaccccagaatgttagaagcactgacagcttgtactgtgcacctggaaaagctgcagacactcaacaccagcccatggaagcagctaggagggaggctgtaccttgcaaaaccacagtggcagagctgcccaagaccatggaaatccacctcttgcatcgacatgacctgaatgtgagacatggagtcaaagaggtcactgtggagctttaagatttgactgccctgctggattttggacttgcatggggcctatatcccctttgttttggccaattcctcccatttggaatggctgtatttaccaatgcctgtactcccattgtatctacgaagtaactaagctgtttttgattttacaggcttataggtggaagggacttgccttgtttcagatgagacttaggctgcggacttttgagttaatgctgaaatgagttaagacgttgggggactgttgggaaggcattactggttttgaaatttgaggacatgagatttgggagggcccaggggtggaatgacatggtttggttgtgtctccacccaaatctcatcttgaattctcacacgttgtgggagggaccctgtgagacatagttgaatcacgggggcagatctttcccatggttttctcgtgatagtgaataaatctcaaaagaccagatggttttagaaatgggagtttccctgcacaagctctctctttgcttgctgccattcatgtaagatgtgacttgtatgtacttccctgccttccaccatgattgtgaggctcctccagccacgtggaactgtaggtccattaaacctctttcttttgcagattgcccagtctcaggtatgtctttatcagcagcatgaaaaaaaactaatacacagagtagtctggtttctatctcttttccaaaatactgttcgttcactatttgtatttgtagtatatggcattctctctctctccacacacctcctcacacctatacatacatactgatacatatacatacatatgtgtatatatatttatatattctaatatctttaatacctccatacatctttacaatatatttagactccacgttttaaaaaattgtccattatttcctaactctaagcaactttgaatttaactagctatattttattcccatggggctccttttaatatagggcctttattcaaagtttaataacataacatcagcctgccctgttagttccttagttgtaaaagtctaggctttgcatgtctgtctccattactgttttgttcaagtgtttttctttgttactttcaataatagatagattatacaggcattatttgtcaaccatcatttctaaaatggaagctgaacctcaaaatatgccaaggaatttattaagagataaaataatagataagtattatctatgataatactataaaaaagagagaaattgtgaatgtacagtgaaactaaataatttcaatgaaggatgctaatatgaagatttcaaacaaattgtcaattatttctgtaaaaactactaacaaaaggagcctgaagttaccaggtagagtggagaagacagaaatactgaaaaatgttctgtaactattaagtagaggatactgagccaaaataaacaaacagtaattcaccaaaataaggtcatgagcttcatgagcttcataattttattgcaagacatgagtctttgtaattttttttttttttttttttacccagaaggggtaacttctaaatgctgagaggtaacactgttgaattccttacctcactttccagacattctcaaaattgttttgagactaatggccttctcttaaagtagacttcaagagccaacttctaagagggtatatgtgaataaatacacaataacaagaagtgaaatcataaaaaaggaagggaagaaagataaaaaaccaaaaagtagttacaggaatatgcgtcaaaggaggaattaatttggctagcagaacacttaaaataaatatttatttatacattagaaaaagtaacgcagttagttactactggaaaaacaatattagatgccagaccatatatactcaaagcctgtgctttcacctgtcatgtaattctgctaaataaatctgaaaaaaaggaagaaacaaagacacagaactgaatgcgttaagaaatagaaaatgtgcaaaatacatacattcaaagattgtttctttgaacaaattaattagacatattaaacactaacataaaatagggaaaaaataaaaatgccaacaatctaaattcaaaataagaacaaagaattagccaaaagttagatgacattaagaaatagtttcctcaactatataaataagtttgaatgtctgattgaactgtaaaatataaattattacaatttgattcaagatacatagaaaatcttaagtagaccagcagccataagttaaaggtaaacagttgcgaatgtattctataatatgcctctagaaaaaaaaaaatgtaattcccagatagtttcacaggttcaattctaccaatatttcaaggagtatttaaatccaattttatttaaatggtttcatagaatatagaaaaaagaaaggcttccaaatatttttaggatagtatacatgccaccaccttgaaaaaataaaatggataaaaataacacatagaaccatacaatttcacaccaaaatccagtctattcgcaatacaaagcaagtactctcttgaaaagcagagattattgcttttaaaacagtgttcctctcctcttacagattattgcttttaaaacagtgttcctctcctcttaccagatatccccaacagacccctgtaaaacccagtcttttagagtagctgacaaggccctttgtgacctgctcactccattctagccagatgcaggtaccctcatatcttaggtattttgtcctttggcgcttcctctggaagaacttttcctcatgtatcttcctggctaatgccctccttcaagtctttgtcaaatctcaccttttataaatgaggtctaccctaatcactcctaatcattctatctaaattagcaaccagttcccataccctcctggatctctcttctctgcatcatctgtttgtttctgatagcagtgatcactttgcaccatgttacataaatgactgaactattgttggtctttgtttgtctagccgtaccagaatgtaagttccagaaagtgaagccacttttatctgttttgtttgttgatgtattccgaacacctagaaatagtgctggaacatgataaactcattatgtatttatcaaattaattggttgatttaaaaaattgcattcctactattttctttgttctctctttttggaaactactattatttatatattgaacctcttggattgagtgactaattttcctgtcttttaaaaaaattttatatttttcttctggttctactctgaaattcttcttaaactttctcctctagtatttgaatatgtttctttttctcatttctgctctaatggttttaattttcaaggactgtatagtgctttctgatttttcttcttcatatagtgttctgttcctatttcctggatgtcatatcttccttaatctttctgaataatatgctaaataatctttctgaataatatgctaaatgtgggattttagggggagctttttttccctcccattttataattatagaaacaaaaaaggaactgataacagtgaaatcctattggaagtaggagctaggggagggaagtctttcatttttcattttatatcttttagtactactttaatctcttgcattatgaatgtattacttttataattatattattgataataataatgagaaggtagaggtgaaggaagaagaaaagtcattaattagataagcactgtgacctttgaccaatgcctttataatatttatgcaagaaaagaaatactcttacctatgggcataatacctacaaatacataatacatacaaggaatacctatcagcatagatccagacagaattcaagtttcatcaggcaacttaatgcccctctgcattctatagtagttcttcaatgaataatttagcgtgcctgtaatgagttctactaactgatgtgtctattcatccttatatattgcagagtaggactatggtgaaggattttaatgtgatctggaattttattcatctgtagttatgctacttgtgtcttgcatggcaatgtaggctatctttagcctactgtgcagcaatctaaaggttaaaccttcagttatccttatttggtagtttccactttggctcccagcctgtttgctgtttgactattgggccccacctatgtgcttgcataaaccttaagtgttttctttgcaaacatgagctgggaggctgagccatcatttccagagaaggtgacttaagctttatatccaagtttggacagtttgggccaacctcacatgtatcatgtttgggacaatttagggtagacattcctggcctaaacccatattcctatgccagtttccttaagcagatactatgaaggccccatattatgagcagaaggctaccccataggtagcctgcttttgcaattctccatctacctgatgggccctgaaagaggactggtcatgcagcatcaagagctggccatcctaatgcatgaagccctttcactggagcccttttcttatggaatggctattattcattcaccatggtgtgtctgaaatgaaagcatgtacgaacttcttgcagattcttttaatgataaactccaatgtcctcaggaagaaaactgggagaagccactttggaggaaccagaggagaggcctgcaaattacaggcagttctatgctgcattgtgctaaagttgctggaggacacagaacatgtgttttacagatgcttaaattattgttcactattataaaagtgagttttattctctttgtttctctaattcagaggaagaagataagtaaagtgtctaattcagagttagacgaaaagcaaagggtccatcaaaatgatggcattgtttttatttaggatgaagtaagaagtgagaagtccagagacataaatttggggtttcttgaattgtaactgggttcacagaggaacagtgatgaggtttgattcccataagcttcaaagagaagattatgagaaccaaaaaataaaattaaatactaaaagatggtacaaagcaccattcattgcttgaaaagggctgagtgatatatggcatctcaacttagaggtaatggtttgagtcggttatttctactctatcaggaaaagagagaaagagacgaaaaaagagaaaaataaaaattctcacatgtgatttatttttgtgttaaaattggggaaaaacaatctttgaaattgtttatttaactcaatggtggatataattatttagagatgttgacaataaaaaatagttgtacattggactatcagggctttgtaatgatagctagcatatcctaaatacattagattttattttacgcattatcacaatgatacctaacatccttgtgaggaaaaaacatattcctcaaaaaaaaaaaatcttaattttcacaaaacatttagaacctttggtaaattaggtcaataaagttactgggtcccactttgattggcttatgacagtctcagtctgaatgactgaacctccttgaaaggcatcctcagattaataataagaagaatttcctagtggcagagctcattagtgagttagccttcttcaactgggagaagactttagatcaagccattggaatagggtgaaaacaaagaaacaaagctttcccctgccaaccatgataaaaagcatttttgaaaatatttgaatacatggttataaaaaagacatttgtagttgttgtttgtaataatttattaaagcaacacacacagtggaaaattaatctctcagtttgactttttatgaatttgtgtatgtgtggatggatagatagatagacagacagacagacagatagatgcagatacacactttctttgtttctgccctcagtgtgaagggacaggggtatgttgaataattcttactgatgcaaaatttaattgctcttctgctttcttacagttattgggatttgtggactagatagaagaaggaaacctagaacttgccaatgtctagattcttctcagttgctaaaggataggttcctttgtccaactcatcacctcagtgaggtggggatgtgcaagttgatgattgtataatataatgcttctctagggcacagtcagagggatgctaggaggaccctaggggtatctcaggtgatccagaggaagtttggcaagttcacaagaaaaagtgacataattgtttggcttatgcacagttcataagtgtgaaatgttagattattttaaattttcacagaaattctgcatgcatttcacatttttctcaaaggttttgcatgtacttaaaaaactgagttggtcagtatactttgactaacattacattaatagaatggttcatcttgacaatgctattttcaacatccaagcagcaaaatcagatgcttatgtattgttttcatttgttaaatagtctttgttcttactagtgtgtactgttatatccccaattgacacaaatgaatagatgactcagaaatacttcattggagataatagtgctattaaaaacaaataaaaggattatattaagatgatgttatgatataaatagtaaatagatcttcagtatgagtacagaatgtgactgtatatatgtattgataatttcacatagctaaaaattaagagtgcaaataggaaatataattgttaatatcaaaaattaagatgtttttattgtatggctgaggtttcatctccaaatatgcctgctgtgaaacttttgaaagtattttatgaagccttctagattttcatgtcatttttaaattcataaatgaaacatgcacttatttatcagaacaaatgcaaattagtaaatcaggaccaaatggaaaattttatctctgaagtcaaagaagagataaaaatgagaggtgcataattacaagttttttctctatagcagaaaccaatataaatcttatttcaccaaagtgcttgcaacagtcaaccaaaattaatgtcaagtaaaagagcacagaaagaaaggtgattatgtcattgccaaaataagccattaccataattcctttatccattatattgttggatattcctttataacagtaggcagttatgattaatacaattccaatttgacccaaagcctcacctaaggagttcttctagtctatcctcaggatgactaccatgtcacattttgtgtgttcatctacctcttacaatcacaaagtcagcatattacaggaactggttgggtaacctggttaaatttgtcttcatcaactcagtcctccctttgaggtaactataattctggttatttttttttccaagtgagtgaaaattatattatacctttgtgatcaaaactatgcaagaatcttttttttttaagttcatttttgtagataccaattgggattagagtgctctgtcttttcccctgtccttgcatattggattccaggcaaaattcaatttatttggttagttatgtctatttatcttaaaatattacttgagtattctcatgtattttaatgttcattgctctctgccccattatatttactctgtaactactgtggatatgctaacaggtgttgtaccttacagctggatgaaaccagaggttgtgtagtgtgtgaatcagttcttagtataggagaaagtctcaacaaagggagaaatgtataattttttgttttgttatatgctaaaaattcaaactggaaaagaagataatttctatttaacttattattgttttgtgagcattcatatagactagaaaaaaatttattctcataaatgctaatactaagacccactaaacgtgcaataaagattagtgttgcagtgcagatgaaattggctccacctatactctcagccacacagtgatttattcatagagaacagttagcagccaacaatttccctcttagtctcagtttggagtggagaaaaaggtacaaattgtgactgtaactaaatggtcatcagtgaatacagatagaacaagactctactttttcatactgaagttttgagtttcaataaaaacggtaagcacgtgagtatttgaaaagaggcttgaaatgaaagcatttcctcataacctagaccaaaacaaagacatcatttttatgacttccagtacttccttccagaaatataatcctagaaatgttagggcctttagaaatataaacatgtcaccccaggtccaacatcccacaattctaaaatggaagaatagaaaatgtcaggatttcttaaagtctacattttggtactatgactcaattattaaaacaaaagttttgtttttcaacgactaacaattttcttaacttcttggtcaagaaggaaatacatgtttacattttatataataacttgattgttgaaaatttgcctttttgccaattttataaattttatttacttttgtaaaagaatttgttggcccaaaagatgaaagagaatataaaaacaaaagaaaaactaataatacttttcaagtcttaatgcaaacagtataagaatgaagaatgcattttcaagatgaaatatgtagccttgcccgcttcgaaggggatgtaactatcgactcagcacccaacagcactgaaagttatcttcactgagatccaccactatattttgagtccatattcaaatgagaacccagatatctggtattcaaataagatacgacagatatctggtatatctcatttgaacatggactcgaaacatactgccatcatttttgaacatggactcgaaacatactgccatcatttgtgatacataagtatgggttaggattttctacttttgtttaaagtacgtatagtagtgaaaaagagaacgaagttgacaaatgagtacctatttctcaggttttctattatcaatataagtgcaaaaatgttggtaaaagtttacaagaatttttttactctcaatatgaaaccattataattgaacttgaaattatttatgttaagtggcttttttatatttagaagtataaagctttttaaatatgaaaattttgggtccatatacattctgaataatcattaaatgctctattaatgtaaaaaattgacaatattattcttacaaatattcaatcacttaagcacaataaaaataataatcatcatactaattatactaattgtcactatttaaatatggaaagtcaagtagttttattttagttatctaaatttattaatcaaagtaatgtactctttatgaattaagacaaaaatcagagaattaggactgtagactcaggtgccagtaaatttttagaaaatgaaatattgtgtttaaaatgaatactgacccttattgagatatgttagtgtaatgaacacttgactcccactttttgtattccagctactgcccaaataacccattcttgacattcacccatttcaaccacattcattcattctcttatttgtacatataacacttaccgatagtagccatcctaacagagattataattcattttggttttgatttgcatttctctgacggttagtgatgttgggcacatcttcatatacttggtgtccatttttacttttctttggacacatatctatccacgtccttgtttttaaaaacggatttttttttggtattgaattgtagcactttcttacatattttaggtattaatcccttattagataaatggtcttcaaatattttctgccattgcacaggttaacttttcactctggtgattgctttctttgctacataggagctgtttttcacttgatgtagttccattcatctgtttttgcttttgttgtcatactcaagcagtcactctccatgcaggagtcaagaagctcttccccttctgggagtttcatagttttaggtcttaatgtttaagtcattgatctattttgagttgacttttgtgcatagggcaataatttgattctttgcatgcaatattaattttttccagcataatttgttgaagaggctaccctttccccattgtgtattctcaacacccttgtcaaagataagttggccatatatgaatggctactagcaaaatataacaagtgtttgtgaagatctcaagaaattgaatcccttgcatactgttggtgagaatgtaaaatggtgtagccactgtggaaagcagtttggagtttcttccaaaaattaaaaacagaactatcatataatccagcaatactacttctgagtatatattgtaaagaattgaaatcaaaatctcaaagagatacctgcactcccgtgttcattacaacatgattcgcaattgccaagatatggaaaaaactcaaatgtccattgacagagaaatggattttaaaaattgtagcatgtacatacaatgaaacgttattcggctttaagaaagacagaaatcctgtaatttggaacaacatagattcttcaggatttggtgatgaccctggagtacattatgctagctattcacagaaggacaaatactgcatgattccactcatataatgtatctaaaatagtcaaactcatagaagcatagaatagaatgatttccagggtcaggagacagggggagatgggaaattgttgctgtatgggtataaagtttcatttatgcaagatgggtaagttctagagacctggtgtacaacatagttcctacagttaacaatatgttaatatgcacttaaactttgtttaaaaagtagatcttaagttttcttaccgcacacataaaaacaaccaaagggagaaaaaaagaacacaagtttttggaggtgttggatatgtttaatacttcaattgtgatgatggtatcacagatgtgtgtatatgttcaaaggcatcagattgtatgcataaaacgtgcataaaatgtgcattttgtatatctattatacatcaataaaactgttaaaagcatttattgagcacttactatgtgttagacactgtttcaggtactggcatacatactgaacataatagatcagtgtttctgccctcatggaacttacattctaatgaagggaagtagaaaataaggaagcaaataagtaaaaacataatgttattatgttcaattgtatcaaatatattgtgagtagttagttaataaagcaggagagggtatatgaagtgtcaggggtacctccaaaagcccttaccgagaaggtgacttcttaaaaaatatgtaaaggatgaagtcagcaagccacagctgtatctatggaaaaagtatgttaagcagagggaagagcaggtgtaaaggccctgaggtgggagcacgtgtgatgtgtttatagaacagtgagaagctcagtatgacctgagtgtaaaagcaagagagagagtaagatcagcaagtaaagggttgagacagtttgtttacatagggctgtaggggttcaaggatttttgctttgattctaaatgatctgagttagtttttaaccatgtcactgtgacttgtatgatcagggagaccaattcctagctaatccaaatgagaaataatgatcatctgaacaggtaatagcagtaaagataataacaagtggttaaaatctggatatctattttaatgctaaattcttcagaatttgatgatggattagatgtgaactgcaagacgaagaggtgaatcaggttgacacaaaaggttttggcctgaataatgctaaggtcagtgttgtcattaattgaggacaggaacatttgcaagtagaacttagactggggaattaaggaacacttatttaagcatgctaagtttgtaatgcctactagacattcaagaggaagtgttaagtagaaatttggatatttacatctaaagctgtgtagtggcaggtagagggaggaggaacagctgctgatattagtcaggaatcatctgcaatgattcacacaatgatcacacacagggactgaatggacagaaaatggagaacttccaaggactgaattctgagacattatagcatttagaggtagatgaggaaaggagaaaccaggaaaggagatggaaaaagagaagccaagacaagaaaaaaaccaggtgacggtgatgtcctaaaagctaatgaaaaaaaaaaaaaagaaaagaattggccatcaggtttagcaatatggagataacaggtgatcatgacaagccaagttttcagaaagtgtttaggaaaaaacctgattggtgcatatccaagcaaatttggacggacgtcatttgagagagaggacagacaacaccacaaggaattttactggatagatgaccaagaaatggaagactaattggagggagaagtgggcattaagaatgaatgtcatttggaaaaataacatgtgtttttatgcaatataaatgatccaaagaggttgatatttattaaatacttacttacattaattcataatccccacaccaagcatgaatattaacaatgaagtaaaatttcatgatgaggtgaggatttgataaactaaaaattatatatatatttcaaagcagctgcactaaaaccacaatttttaaatggctccaccaaaattgccaagtcaaatgccttgtaaatctaactccttcatgtccttttctcctttccaaatacttacactctcataggaatgtattccttttaaactgccatctttccttgaactttttgtattttaaatcttaaatataaatttaggaaaaaaagctttgtttctctttaaggtgatttctgctactaataagccatagtatggaaatatcttggaagtcaagaggctcctttgtatgatcttggccctgaaatcagcccaggacctgagctgactttgagaatcatagtccggttatgttagggtattacataagactggatcagggaatgagggaagcagaataggacagagaagaagccaggcacagatgtgggcttaactagtgactaacttcagcctgatcccatgggcagccctgaggcatgaatttcaccgtggagttgtttctttctgagataagggtgctgggctcttgtgccaccatgtttgtcagtcatcgtctataggctgctctcagtgcaaaagttggtgataaagagcagtcacttcccagataaggcagcttttgtgcttcccaggttaattttcaggagaaaaggagctcttagcagctagacatggatgtaccgccccaggaaagggatccggatggagcggcaacagtgtccaccacacttgccgtcagtacctaccatttagatgcctctacgttcctcttaggaagagtgatataggttcaataaggtaggcatggatgttgtttattgttaccagagcaccaataaaggaaagtgaaacattccaaagccttgatgtctgcaaaatattagtataccaactccttgtctattttcccatgtgcatcttatgaatggccatgaaggctgatcaggaccacagtttacctctgcctgtctggggtcacccacaaggaatccctgggagttgaagtacaaatatatcctctctgctaccccctgtaaggagagttctcatctataatgcatcatctatcattgtccttaggtgatattcacagtagattataatgacttcatacttgacatgtatgtgtaaatttcatgtggctttttgctcatgttagataactgctttaattgtgttggtggttgacgataatcactataactgcatctatgagatatttgtgcaagcagacttcgtgttttgtatttatgcctgttaaactttcctgtaaatattggcacaggtacatcaccacatacttttacataacaccagaaaacattgttgtagagcaattttaggaggagggagaacactgagatgtcaaacttgtgtttagattttagttcttttactttatagctaatctgggcaaataagttaattgacattcagttttatcatctttaaaatgggaattaaccaatccacctctattcccatccccaaggattttagtgatgcctcaacatgataaaaaagaaaaggaaacttgtcataaattctttgcttgggccaatgtccagagagtttttcctaggttctcctctaagatttttatagtttctggccttacatttaagtctttgatccatcttcagttaatttttgtatatggtgagagacaggggtctagtttcattcttctgaatatggccagccagctatcccaacaccgtttattgaatagggtgtcctttcccttctgtttatttttgtcacctttgttgaagatcagttggttgtaggtatgtggctttatttctgggttctctattttgtttcattgatctatgcatctatctctgtaccagtaccatgctgttttagttactatagccttgttgtttaatttgaagtcaggcaatgtgatgcctctagatttttttctttttgcttaagattgctttggctatttgggctcttttttctttgttccatatgaaattataggattgttttttctaattctgtggaaaatgatgttggtaatttgataaggattatgttgaatgtgtaaactgctttgggcagtatgattattttaacaagattgattcttccaatccatgaatatgtgataatttttcatttatttgtgtcatctacaatttatttcatcagagttttgtagttctccttataatgattgtttacctcctttattaaatgtatttctaggtattttgtgcatgtgtgactactgtaaatgggagaaaatatttgcaaattatgcctctgacaaagaattaatatctaaaaggaaattaaagaactcaacaagaaaaataacctaattcaaaactggacacgaacagacatttctcaaaaatgaaatacaagcagccaacaagtgcacgaaaaaaaaatgctccacatcaataatcatcagagaaatgcacattaaaaccacaatgagatgtcgtcttacactggtcagaatggctattattagaaagtcaaaaaacaacaaatgttggtgtggatgtggagaaaagggaacacttatacactattagtgagaatgtgaattaattcaacctctatttaaaatagtaagaaattttttcaaaaaactaaaaatagaactgctactaggtccagcaatccactactgagtatctaccaaaggaaaaaaaaaaaatcattatttaaagaagacacctgcacttgtatgttcgttacagtgttgtccacaataacaaagtcataaaacctaagtgtccatcaatggttgactggatttaaaaatgtgatatataaacaccatgaaacactttgcagccataaaaaagaataaaaacatattctttgaagcaacatggatggagctgaaggccattatcctaagtgaactaactcagaaatagaaaaccaaacacttcatcttctcacttgtaagtaggagctaaacgatgggtacacatggacataaagaaggaaacaacagacactgggaactccagaagggtgtgggagggagggtggtgagggctgaaaaattatctgttgggtataatgttcactatgtgagtaatgcgtacactagaagttcagttcccaccagtatgtaatgtactcatgtaacaaacgtgcacatgaaccctatgagtctaaaataagatacaataaaataaaacaaatagtgtaaaaagaaaaaaaaaaagaaagaaaaggaaacttcttcaatgcctggctccttaaattcctgctctttctttcttcttcctcccttttatcctatgcagaggtagagtttgtgtgttttctttttttcaaacccgtccttgaaaggaactcatttgcattatgtcctggcgtggagtgttgtactgtgacttcctgtgatctctgcagtctgtcttcacctcaggcccaattaatctggacctcagcactccttcactttcctcaaaaaataaataaataaataagaaaaaaaagaaaaaagaaaaattcacctgtgccaaatatggtagagaaaaataggacatttcctcaatcttccaaaatgaaaatgcagcagtgtccacattttcttcctatccctcatcagcaatttgctccagaccccactctgttgcagttcctcaaggtccccacctagccaaagccaatagctcccctccccaccttcaccagtctccctttggcctctattatgctaacactccaagcacttattaaaggacatttcctggtaaaggacatctgattacccacccacattatagtaagaaagcaggcaagggaaggtttgggtgagctaatacaaaacaacttccttttacttggtaggaaaattacttctgccagtaatttgtgatctgaagattctttcgcttctaggtctaaataattgtgtaaactccatttgtttcatttgaaatgtggctgtcatttcccgtcaggaggaaaacaagagaaactactaatatacgttcatcctctgatcacctgtcagcctcacaggaacacgcatctcacaatttgtccctgcccaggcacttcatcttcaaacagaaactgcatcttaattataggctttaatgggctgtttcactccaggatcaatatgtctgacaaaaaccaggcttcgctaaaagctcattaattcacatccgactaattcaggatttgtgatgattttggcagggaccacgctgaagttttgcctcttatactgctgcttacaaaggcttagcttggccaattaattagggagaacagaattgccagggaagtatttacagaacaccagtttgcacagagatacagcctgtttgtagcttccagactgttcagctcttaccaggcaacctgatttaacaattattttttattagcactctggacatagaaactgaaaagtgtactgtctcaaaaagtgtctgcagatgcaccatgttggctccctgtggcccatgccttcggtaccttatatccattacttgttttacctctcattgcagctgcagctgaggtggatgtttctatgtggggtcagagtcatttctacgggcaacatccaatccccaacaaggaatgtgagcatctccttgttctttatctcaggacctcctctgaacccacaggaaaaacaagctagaagtgcagagggttaatctcttcagagaataatgttctaccaaggggaactggtgtcagtattggtgaacaccttgcaagttattctccaagcttttcagaagtccatggccaatagccgtgactgtgataacgtgcactcttttggcttcccctgctttcctgagttaccgcttcacttcacggtattgcttcccaaataaactatctacccctaagagtcacactcggctttcaggggaacccaaactaaggcactcactcctccaaacttttgtatgaatgaatgtacgtatttgagatgctctctcatttcttcacccacttgttttttgataaatgtattcgtttcttgggctttttgggcttaggaccatcttttggtagtaatgtcaaacaagcaatatctgtcttcattattttccttttctacccttacagaactctttctctttttgctaatgtctttttcttgggttcttacagtcccctctacatccctctacccagtttcaatctgtccctgctaatctcatttctctgcctccttcgtttctccaatatccacataaattattcctcccctgactttattccctgtccagtgttccgtttcttagtaatgtaacctctactgactaatgtggtagatggatccatgtcaaatgacttgcgtgtgtttatgttactctgagaaggtaagaagtatgtggttatccggggccttctaagcaactgagcctccccatgattgcccaaatcatgtctagatttgatatcccaactattcctgtcttcttgaacctacattgtcttagcatttaggacataaacaccatttttttttccccctgagctcctcgggtcttcctgcttcatctttttggtctcctcttcttcccatgctttaatttcttgttactcataatgtgatctgtggatctgtaacactaggaagtcttttttttagacagagtcttgctctgttgcccaggctggagtgcaatggcatgatctcggctcactgcaacctctgccttctaggttcaagcaattctcctgcctcagcctcccaagtagctgggattacaggagcccgccaccaagcctggctaatttttatatttttagtacagacagggtttcaccatattggtcaggctggtctcaaactcctgacctcaggtgatccgcctgcatcggcctcccaaaatgctgggattacaggcagaaccactgtgcccggtcaggaagtctttttttataaatgtagaattttgggtcctacaccagatctactggaccacagaatttgcattttgaaaacacccccaggtgattcagcatcttaagattttagaaatgttgctgcaattgatggtggtttcttaggtttgcagacctgtttctcgtcctcaatttctacattcttcagagaaatgtctctgtccttatagctccagataccgtccataaactgatgactgcaagaacttattcccaaggccggacacattggctcacgcctgtactcccaacactttgggaggccgaggcgggtggatcacctgaggtcaagatttcgagaccagcctggctaacatggtgaaaccctgtctttactaaaaatataaaaattagtggggcatggtggcgcgtgcctgtaatcccagctactcaggagtttgaggcaggagaattgtttgaacccgggaggcagaggttgcagtgagccgtgatcgcaccactgcactccagcctgggccacagagtgagactccatctgaaaaaaaaaaaaactaaaaataaaaataaacttattgtcaactcagatctctattccatgcttatgttaatttgtacaactggtaaactgcccacatgacatttatatttggaaatctcacagatgaacccaaatcaagataaggaaatgtgattacttcagtgaggctgttgctggttgggttagcctggatacctttcagaagcatgttcacaggagtgaagctgttgctgacaggctagcctggatattgatgtcaatggagatcagttgaaaactgatacaggtagttatggttgctatagtcaaagaataattggtcatattctttcttaaatttggagtctaagaactttttattcccccaaattaataactccattaatacttagtcccacaaaaaatactttgtggtagatattgtggtacttttccggatcccctgttcagagtaaacacaaccattcccctaacactgggagtatgtatctgcagctgcagcccttactaggaattgtcctaggttgtaggaaatgtattttttcaaaggtatgtccttcacagggggtagactaaggccaatgatgggccgatatgggaatagaggtctagctcccttatttcaatatgagataaatctgaaggtctcatttgagtttcagagctcccatagaactagctgaggcctcagtagcaaccacactgtggatcagattctctctatatccagtactgccttcctcacttccccacagatgtatctcctgagagcattcctgtacacaactcctgcaggcaaagctttatctcagagcccattcctagagtatacaacttaagacaccactgcttctccatgactccccctcttactgaatgcaccaatactatcctgttgctccagtcagacaacagggaatcatttttttttacttttctctcctcatattagctcacatacgaggatgacaacatcgcatttattcttcctttctatccttatgatcattgccctagctgaagctttcattcgtctcttacctggataactgcaacagcctcctgacttgttttctcactgcaactaaaataatatttctaaatttaaaaaagctcatattatttaccattcttctgtaacctcctattccctcagcataaaatctacacttttgaaggtactgcataacaccatttggttcactcagcactgggcttacgtgtcccagaggaatcatttcattgtgttgccacaagttatcaaattgtctccatacataaaagtggccttttggatgccagggatgtatttttgtctctcagtatccttctagccttgttcaaagtgtggcctcttgtgggaacctgaatgaaacttccctgcagacatctactcaattctcctaagtaagtcatttctctcatcccacccattctaaattcagggaatgaaatgagatcactgtttgcttatgtatctaaactgtcacttacgtttacttcttaagaacaaccatttaaacttgagggcacgatgatccatcaggaatttgctggggtggctggtcagccaggatttacagcactctgctgatgggatttttttatgcaccctgtaaattttagttatcgctacacttgtttgtggtcagcatggacaaggctggctcctttttgtaatttcataagcacaataaagtcataaatttcaagctgcctttttcttttcctgattttttttttctttccagtagcctattgcctgaagcacaatggactttcaaaggaaaatgtcagcattaatagacagctactctaaatgagccaggtagtgctgcttcaaggttatttgaaggtcatccctaccttataactgaagacctcagattggaaaagtgtgaggattttctctgtgaacaagtaaccaaaccatttcagagctgaaggataagcatacggatgattatccaaaagttagtgccattctcatgcctctaccagatggtgactagtctttggaaaaactgtacaaatagttttgacgtgacagaaattttctcaggctttctggataatagtagccttcttttacttcagtactgtgtaaatttatcccaacaacatagtttatgctcacccaaaatattattctcaaagattggaatggtttctataataaacttaattacaatagttgtagatttatagaaaaattgagaaaaaatacaaaaagttatcatatatacgatacccagcttctcttgttatttaacttcttaaatattggtatgatatatttgttatgcataattagccaatgttatctaaagatcctgatttattaatatttctttagttgttttgtttttgttgtaggtggtgttttctggttttgttttgttttctttcttttgtccattttgatgacctgggaagttttgaggagtactggttgggtattttgtagaatattctcaattaggatttgtctgtttttttttttttttttttttttttttttttttttttgtcatatttgactggctgtgtaggaggaagaccacaggaatgaagtgttattctcatcacatcatatcaaaagtacatatactacacgtaatcactattgatgttaacactgaacacctggctgagatagcatttgtcaagttttttcaatgaaaggttactcctttctcttcctttccatactatattctttggaagggaatcatgtgcaactcatacataaggagaagagaattatgccccatctctttgatggccaagtagctatacaaattttttgaaattcttctgcatgggagatattcctattgttacccacttattttttattcaacaatttatttatatcaatatggactcctctatgtgatactgtaagcagatcttatacttttggttataatcgaataccacttattccttattttattactcagattgtttcagacatggccactgggctcagttggccccttttctttttaacatatttccattactgtgggtttgtttgtttgagcacatctttactttctgaccctgcaagattctccaggcttatttcctgtcataatcttacaatcagccatttctctaaatatcccttgttccttttaaaggaggatgatattagaaacttagatttgaatattagatgtgcttgttgctatcggaatattatttcttctaggacctctttactaacagaaggaggaaatatatgtgtatataataacctgtgtacatacatatatagatagttattcctatgtgcaaccatctgtacctatattaagctaaacatgagtttatactaatattccactgtatggatatacaaccattcgtttttgtattcacctgttgaagaaaatcttggttttatctagttgtaggaaattataaataaagctgctttaagcattcatatgtaggtttttgtgagaacataagttttccaatcagataggtaattaactaaaagaacaattgctaggttattgtaagattatgcttagttttgctagaaactgttagtttgtcttccaaatggctatcccattttcattctccctggcaatgatgagagttcttaatgccctataaccttgccagcaattagtaatgtcaattttttgggttgtgatcatcctaattggcttgtagcagtatctcattgttattttcattagaaattccttaatgataaataatgttgaacatttttacatatgcttatttgcaatttgtatgtcttctttggtgaagtgtttgttcagatcttttcccatttttaattgggttgttttttatgttgagttctaaaagttctttgtgtattttggatagtcttttatcaggtatcttttgcaaatattttctccagtctgttacttgtctttttgttttcttaagaaagtctttcacagatcagaagtgtttaattttaataaagtccaatttaacatttttttcctttcatgcatcatgcttttgatgttgtatctaaaaactcatcactgaacccaagatcattatttttttcctccagaagttgtatagttttccattttgcatttaattctgtgatttatttttgtaacaactgcttgagatacaattaacattgcatacaatttgcccatttgaagtgtacaattaaaggctgccagtatattgatggagctgtgcaaccaccaccacagtaaattgtagaacatcatcatcaccccagaaacaaaattacccaatttcccccacctactgctcctagctttaggcaatcactaatgtgttctttgtctctatggatttctctattctgaatatttcaaataaatggaatcatagaacatgtattttttgaactggcttctttcacttagcataatgttttcaagatttatctgtggtgtacaatgataggtactttattttttatagctagtgttccgttacatgaatatatcacattttgtgtatccattcatcactccataggcatttgtattgtttctgtcttttagcggtcattaaaaatgctactatgagtctttgtgtataaatttctgagtgaaaatatgtcttcatttctcttagttctatacctaaaagtataattgctggtttttatagtaactttgtatttaagttttgagaaagttcaagatttttttccaaagttgcttcaccattttacagtcccatcaggagtatatgatggttctgatttctccacatccttgccaacatgtattagttggcttttttagtatggccatcctagtaagtttgaagtgggtttcaaatggtatttcactgtggttttaatttgcatttctatgattactaatgacactgagcatcttttcatgtgtctactggccatttgtacatatttttggagaaatgtctttccctaatttttatttccattatttgtctattattgagttacaagtattctttataaattcgaaatataaaccccatattaggtatacaatttaagaattcttccattttatctgttatgtttttactttctttatatttgtttttgaagaacaagagtttttaaatgtgatgaaatccagtttgtctactctttttcctttcttgcttgtgctttggattttatatacgaaaacttattgccatatccaaggtcacaggaagattacatctgtgtgttttttctaagagttttacagtgctaactccttggtcttggatccattttgcattaatttttgtgtaggtgtaaagtaggggtccatctttattttttgcatgtatatatctaagtgttttataattatttgttgaaaagactattttccccattgaatggtcttgacatccttgctaaaatcagttagccatagatatatgggtttatctctgaactctcaattcaactgatttatatgcctatccatacgccaataccacactgtcttaattatttttgttgtctagtaaattttgaaattggaaattttaaggcttttgaatttattcttaagattacttttgcgattctgggttccttttgttcccatataaattgtagtgtatgagccattttgagttaatttatgtgaaaggtgcaaggtgtttatgttcattttttgcataagaatgtccaattttcccagcatcatttgttgaaaggttatcttttcttgatttaagtgccttgctcttttatcaaagatcagctcagtatatttgtgaatctatttgtaggttctttgttctgttgcattgctgtgtctattcttttgcccttatcttgctaaaagtattaattactgtaactttatattgctttaaataaaaataaatagtgggagtcttcaactttgtttttcttcttcagtattgtgttggctataattagaattttacttttccatataaactttagaatcagtttactgataaatacacaataacttttgattggctatgtattgaatctatagatcacgttagaaaagactgacatcttaaccatcgggaatcttctaattcatgaacatggagtatctcttctttggtttctttcattatagttttctaattttttactgaacatacattttctttttcttttctttttttttttttttttttttttttttgagacggagtctcactttgtcacccagactggagtgcagtggcacgatctcggctcactgcaagcttggcctgtcgggttcacaccattctcctgcttcagcctcccgagtagctgggactacaggtgcccgccaccatgcccggctaattttttgtatttttagtagagacggggtttcactgtgttagccaggatggtctcaatctcctgacctcgtgatctgcccacctcagcctcccaaagtgctgggattacaggcgtgagccaccgcacccagtccatattttgttagatttatacctaaatcttttgaagttattctaaaggtatttttaaaatttttaaattgtaatagtttattgatcgcaggtagtaaagcaattcactttactctattagccctgtaaatgcaagcttgcaaacaaatacacttttatttcttctttctcattttatataccttatatttccttttcttatcatactgcactagctagaaatttcagtacaatgctgaatagaaaatataatataggaaatctctgccttgttcccaatattataaaaaagcatccagtttctcaaaattaagtatcatgttaattgtagattttattgcagttttttttaatcaagttgagaaagttcacttctattcctaatttgctgcatgggcagtgtatctaactgataaaggagtatatccaattgcttcctcctctctcttaaaatattgctgtcattcatttcacttatccagagttataattacccaatatatagttgctattattattttgaacaaatagatatctgtttgatcaattaagaataagaagtgaaaatatttattttaccttcatttatttcttctctaacactttttttctttatgtagattcaaaattctgttatcatttgctttctctctgaagaacttctttaaatatgtcttgcgaaggcgatctattttgacaaattcccccaatatttattagtctgagaaagctttactccttctgcagtttggaagagtaatttcactgggtacaatagaccctcactcaaatctattgaagcttttttttttttaaatgagtaccagagactttaagatctcatataataccccactgtcaacattagacagatcaacgagacagaaagttcacaaggatatccaggaattgaactcagctctgcaccaaacagacctaatagacatctacagaactctccaccccaaatcaacagaatatacatttttctcagcaccacactgcacatattccaaaattgaccacatagttggaagtaaagcactcctcagcaaatgtaaaagaacagaaattaaaacaaactgtctctcagaccacagtgcaatcaaactagaactcaggattaagaaactcactcaaaacctctcaactacatggaaactgaacaacctgctcctgaatgactactggatacgtaacgaaattaaggaagaaataaagatgttctttgaaaccaatgagaacaaagtcacaacatactagaatctctgggacacatttaaagcagtgtgcagagggaaatttatagcactaaatgcacacaagagaaagcaggaaagatctaaaattgacaccctaacatcacaattaaaacaactagagaagcaagagcaatcatattcaaaagctagcagaaggcaagaaataactaagatcagagcagaactgaaggaaatggagacacaaaaaacccttcaaaaaatcaatgaatccaggggctggttttttgaaaagatcaacaaaattgttagactgctagcaagactaataaagaagaaaagagagaagaatcaaatagacacaataaaaaatgataaaggggatatcaccaccgatcctacagaaatacaaactaccatcagagaatactataaacgcctctacgcaatgcaaataagtggaaaatctagatgaaatggataaattcccggacacatacaccctcccaaaactaaaccaggaagaagttgaatccctgaatagaccaataacaggctctgaaattgaggcaataattaatagcttaccaaccaaagaaagtccaggaccagacggattcacagctgaattctaccagaggtacaaggagaagctggtaccattccttctgaaactattccaatcaatagaaaaagagggaatccctccctaactcactttatgaggccagcatcatcctgataccaaagcctgacagagacacaacaaaaaaagagagttttagactaataatcactaatgaacatttatgcaaaaatcctcaataaaatattggcaaaccgaatccagcagcacatcgaaaagcttatccaccatgatcaagtgggcttcatccctgggatgcaaggctggttcaacatacgcaaatcagtaaacgtaatccagcatataaacagaaccaaagacaaaaaccacatcattatcccaatagatgcagaaaagacctttgccaaaatgcaacagctcttcatgctaaaaactctcaataaattaggtattgatgggatgtatctcaaaataataagagctatttatgacaaacccacagccaatatcatactgaatgggcaaaaactggaagcattccctttgaaaactggcacaagacagggatgccctctctcaccactcctattcaacatagtgttggaagttctggccagagcaatcaggcaggagaaagaaataaagggtattcaattaggaaaagaggaagtcaaattgtccctgtttgcagatgacatgattgtatatttagaaaaccccatcatctcagcccaaaatctccttaagctgataagcaacttcagcaaagtctcaggatacaaaatcaatgtgcaaaaatcacaagtattcctatacaccaatattagacaaacagagagccaaatcatgagtgaactcccattcacaattgcttcaaagagaataaaatacctaggaatccaatttacaagggatgtgaaagacctcttcaaggagaactacaaaccactgctcaacgaaataaaagaggacacaatcaaatggaataacattccattctcatggataggaagaatcaatatcgtgaaaatggccatactgcccaaggtaatttataggttcaatgccatccccatcaaggtaccaatgactttcttcacagaattggaaaaaactactttaaagttcatatggaaccaaaaaagggcctgcattgccaagacaatcttaagccaaaagaacaaagttggaggcatcatgctacctgacttcaaactatactacaaggctacagtaaccaaaacagcatggtactggtaccaaaacagagatatagaccaatggaacagaacagagccctcacaaataataccacacatctacaaccatctgatctttgacaaacctgacaaaaacaagaaatggggaaaggattccctatttaataaatggtgctgggaaaactgactagccatatgcagaaagttgaaactggatcccttccttacaccttaaacaaaaattaattccagatggattaaagacttaaatgttagacctaaaaccataaaaaccctagaagaaaacctaggcaataccattcaggacatagacatgggcaaggacttcatgtctaaaacaccaaaagcaatggcaacaaaagccaaagttgacaaatggaatctaattaaactaaagagcttgtgcacagcagaagaaactaccatcagagtgaacaggcaacctacagaatgggaaaattttttgcaatctactcctctgacaaagggctaatatccagaatctacaaagaactcaaacaaatttacaaggagaaaaacaaacaaccccatcaacaagtgggcgaaggatatgaacagacacttctcaaaagaagacatttatgcagccagacgacacatgaaaaaattttgctcatcataactggccatcagagaaatgcaaatcgaaaccacagtgagataccatctcacaccagttagaatggcaatcattaaaaagtcaggggacaagtgctggagaggatgtggagaaataggaacacttttacactgttggtgggactgtaaactagttcaaacattgtggaagtcagtgtggcgattcctcagggatctagaactagaaataccatttgacccagccatcccattactgggtatatacccaaaggattataaatcattctgctataaagacacatgcacatgtatgttcattgcaacactattcacaatagcaaagacttggaaccaatccaaatatccatcaatgattgatagactggattaagaaaatgtggcacatatacactatggaatactatgcagccataaaaaaggatgaattcatgtcctttgtagggacatggatgaagctggaaaccatcattctcagcaaactattgcaaggacaaaaaaccaaataccacatgttctcactcataggtgggaattgaacaatgagaacacttggaaacaggaaggggaacatcacacaccagggcctgtcatggggtggtgggaggggggagggatagcattaggagatatacctaatgtaaatgacgagttaatgggtgcagcataccaacatggtgcatgtatacataagtaacaaacctgcatgttgtacacatgtaccctagaacttaaagtataaaaaaaaaaaagatctcatagtaaatgtattttcctttctgaatcttgggcacaaaattgctttggatattttttctaactattcagctgacaaatactgtgcttacaaaacatttattaagtgtttttagtctttagtcactatacaatgcataaaatcaaatacaaagtgagggagaaaactttttggttatgtatattaactgctggtcagtaaccaaaagattattttgaaatccaaaagagagattgatcattattattatttttttgaaaatgttgccacatcaaagaaaatatacagaattgcaggattggaaatgagaactgaaaccaagatagcttcctatttctgagttaaacaacactaagaatggggatatttttctatctctatgttaaatactactaaaaacaatcaaaataacatagctacttgctccagaaaattattcttccaggaaggctgcaaacaactgaaatcacttaaatattatgaccaatagcatgtttaccaagtcttttttcaagagccttaccagttttgctcagtaatccaaagctattatgtcacaaactctgcccagtcacaaacagttcttcacgttcccactttaagtccaccagtcctagtcataaaaccctctacagatcctctttctacttctccctactgagacatcaccaagacctaggaaggtggtgatatagtttggatgtcggccccctctaaatctcatgtcgaaatgtgatccttaatgttggaggtggggcctggtgggaggtgtttgggttttggggcttgatgcctatcctatggtaatgaatgagttcttgctctattagtttactagcgagctggttgtttaaaagagcctggcatctctctcttgctccctctctcaccacgtgacatgcctactcccccttcacttccaccatgagtaaaagcttcctcaggtcctcaccagaagcagttgctagtgccatgcttcttgtacagcctgtggaatcatgatccaaataaacctctcttctttataagttacccagtctcagatattcctttatagcaacacaaaacagactaacacaggaggcactctacttcactgaaataaatctaacaatcttagctttgtttgatcagtaggtatatttaaatatcttttgggcaattgataattgacaaaagaagttgaaaagggaactgaatgtagcacttttaaaggcctgtagtatagtttacattgtagagtctactattgctcttggatttgtttttaaatgtatgcctaggctgggtgcggtggctcacgcctgtaataccagcactttgggaggccaaggcagacagatcatgaggtcaggagatcgagaccatcctggctaacacggtgaaaccccgtctctactgaaaaaatacaaaaaattagcccagcatggtggtgggtgcctgtagtcccagctacctgggaggctgaggcaggagaatggcatgaacccgggaggtggagtttgcggtgagccgagatggcgccactgcactccagcctgggcggcgacagagcagcaagactccatctaaaaaaaaaaaaaaaaaaagcctaaatcctctctagtaacaagaaacattatatttattttccttgttttcttctaggacaaatctgtcaaaaacttctcccttatttggctaaattccatctcctttttacattaaccactggaaagctcatgaaccctcttgcatcatctgggatgatttatggcttttatgtgcactttccagaaacacaaatgcaataatagttctgttgagaagcttaaagaggaaggtaacttatgactgttctaacatatttttaaaatatagatggctccttaaagacctcaaatggaccacaaaacattttaacaaaatctgaggagatacctactaatgggatttattatcaaagatctaatttctagtgacagccattctgaaatattatttgagatcattgtaaattaagtaagcaagccacaatcagagactagaaaaagcttccctacatctctacttacttttttttattttttgggtcacttcttaaatccacagaccataaagagcttgggaaatgattttcatgtcaaggtataattgcattataagctgatatataaatcattttcttaagctaggtaaattatgctatgccactgatcaatagtgtctgaatttctctttttcattgtgttaacataatcataacataccgttttgtgactacatttctaagcccacatatactgttttaaaagctcaagatctgtcgggacaatctggacttggtcatgatctggcttctctgggtcattgtcagacatctggtcaaggtgagcctgaacagaagaaaatctgtggagggacacacaaaatgatcatttaactgtccacatatgccggcaaagatgaggatttgaatgacctgcccagctccataatgtgcctctccccactggccacatctgaatgcccttgatgtatccacttataggcttgtgggacaagtcactacccaaaggaatgggagaagcactgatccaggggttctaatactatgatctgcaaagaactgggctccagtgatcaacagtgagtacctctgagacagcaaaacttacttcaaccaacaaagtgctatatttttgttttcttgttttacatagtaatagttatgtagattttatttgaataaaaagaaaaaagtgcatctgatgaaacatttgaaaacttgttatctatttccatactatagggacttgtatccaattcaatttaagcttttttctatccaaattcatggacccattcaagtctatgtgcagacctggatggtgcacagatcccagtctaacagccccatcttatgaccacagatggctctgttatctgccaacagtcttccttgacacaagttacctgccttgtacatctacatattgctttattacatgcccttgggcaccttctcccagggacccatttgcctagcaggtgactctcacagcctgtcccccatggtcctaccctgatggcccttcatcacctatggagtcagtatcacatcttcagcaggtctcccctggctgccttttccacaatagcaactacatttacccccgatatggtttggctctgagttcccatccaaatctcacctcaaattgtaatctccacatgtcaggtgagggacctgatgggaggtaattggatcttgggagtggtttccctcctactgttctcatgatattgagagttctcttgagatctgatgatttcaaagtgtttggcagttaccccctcatgcattttctctcttttgctgccatggccatgtaagatgtaccttgcttccccatcaccttctgccataattgtaagtttcctggggcctccccagccatgtagatctgtgagtcaattaaacctctttcctttataaattacccagtctcaggtagttctttatagcaacataaaaactgactaatacatcccctccgtctctttcattctgtccagctttatttgtctttgcaattacatggaactacctacaatgtatattaaataatgtacttatttattgtcactctcttgcactaaaatataaactccatccatccaaggactttgttccactttctcctaaatcaccagtgccaggcaactcaataaattaattatacttaaaaaaagaaaaaaacaaaacaaaattgtggttctactctgcaacttcctagattcttgtttgttctttctctcattagctgcattaagggttgttcaggtctgtgtcatggccaggtcattttcacataagccccattacaaacttaataggaagatcaaaagatcagcctccttctttcttagaaaggacattctgtctcatgccctgccttgcttttgatccatggatggctgacttctttccaataagatgcccattcatcttacacaaatagagggatgggaactactgcctattaccttgtgtaaagaatgtctggttctgccagctgccttagtaccctatagctacccatcaagaaaaacaaaaaaacatatgtctgaaatgctaagaagtccgggactctacacatcacagtgagattgcattgtagtccaattactgaaagtaatttaaaaatgtttctatccttactcaagtgccaagtcaatacccacattaagcctttgtttcttcttttaaaaacacacatataacacttccctctcttctctggttcttaaataacacattcctgcaccagaatgtcactaaactcttcatccacaaatctatcactaaaactgtcatgaatacccaaacttcataggcccttctctgtcttccactccctgcacctcactaacctcacctccctggccgaagttgccagcctgacttttgccttctatcagtctatctagctatatctgtctgtctgtctgtctgtctgtctgtctatctatctatctatctatctatctatctatctatctattgatccatctactatctaatcatctatctccatatctgtgatttagttatacctcgctccagaacttagtagcttaaaacaatcattttttagtctaacatatctcttccaagacatttatttactacaaagggaaacataatcactttaaaatggaacaatcaggaagaaaccaccttagcctcctgtgtaaggtgattagcactagcaaaaggccaacttagcatgatggatttgtagatatgatgcattgagaaggaccccacatcattcctaaaatgcaaaagctcagtcaatcccaaattgagaaatgtttcatgaatgactgttcagtactcttcaaaagtgtcaaaatcatgaaaaacaaggaaagacttaggagttggcatagagcggaaaagactaaagagatcagaactaaatgcagtgaatcctggattggatcttgaaacatgaatgaaaatagactctagtgaaaaaactggtgaaatttggatatggtcttcagttaatagtaacatgccaatattaatttcctggttctgatatttgtactatggttccatgtcatgataatattagcagaagctcagatagagatttatgaaaactttctatattactttagcaagttttgtgtatgtctaaagtatatcaaaataaaaagttgaagaaaaacacacaaggatttattatttctcacacttccgcagattctcttggtgattcttttgtgtctcttctggactcacatatctaggagcatttaccttgtaggttggctgagtgttggcttcgctgggacatgaggaaactgggaatctctccatgtagtctttcatcctgggctgctttgcattatgtcaggaaatggttccaggagggcaaaaccatgagctataagcctcctctgccttcccttgacagttgtaccacattacttctacattattctgtcagtcaaaatgggttttgagtccagggcagattaaaggggtaggaaaatagactttagctattgatgggagtagtggcagagtcacatcacaaaaggttgtggacacagggaggtgtctatgtctcttcaggctactataacaaaatgctatagaaactattggcttataaacaaccaccattaatttctcacagtactggaggctgaaagtccaagatcaaggtgcccgcagattcagtgtctcactagggcccattcctcatagacagtgccttctcaatttatccacacatggtggaaagggataattagctctctgcagtcttttttttttttttagttttttttatttatttattattattatactttaagttttagggtacatgtgcacaatgtgcaggttagttacatatgtatacatgtgccatgctggtgcgctgcacccactaactcgtcaactagcattaggtataactcccagtgctatctctcccccctccccccaccccacaacagtccccagagtgtgatgttccccttcctgtgtccatgtgttctcattgttcaattcccacctatgagtgagaatatgcggtgtttggttttttgttcttgcgatagtttactgagaatgatgatttccaatttcatccatgtccctacaaaggacatgaactcatcattttttatggctgcatagtattccatggtgtatatgtgccacattttcttaatccagtctatcattgttggacatctgggttggttccaagtctttgctattgtgaatagtgccgcaataaacatatgtgtgcatgtgtctttatagcagcatgatttatagtccattgggtatatacccagtaatgggatggctgggtcaaatggtatttctagttctagatccctgaggaatcgctacactgacttccacaatggttgaactagtttacagtcccaccaacagtgtaaaggtgttcctatttctccacatcctctccagcacctgttgtttcctgactttttaatgattgccattctaactggtgtgagatggtatctcattgtggtttggatttgcatttctctgatggccagtgatggtgagcattttttcatgtgttttttggctctgcagtcttttttataagggcactaatcccattgaaggctttgcccaccaaatctagttacctcccaatgttgcccctattatattaatatcactgatgtcaggcttcagatttcaacatatgaattttgaggaaacacaaacattgaggtcatggcaggagtcataatctattgaggtcgttattgtaaaaatctataataagtcacactgagctgcaccaggatactcaagcaactgaaggcagagactggatgcctccttcccaactgcagtcacatctcttgctgaagcccctggagagcatgggcctcctctcaccctgaatcatcctttgtcatgaaaaaaatcctcatggaataaaaaataattccacccatacatctccttgtagaatgtattatatgtgtatgtatgtgagtatgtgtggagatttactttatgtttttaggtttattttactttgtagtagcaaacctgattgtcccatccattagtttaaattttatttcccaaagctcaattctgtgttgattgcaacacagatggtttctgggtgtgtgtaacactaagagcaggggtggggagggcaatgggaacttcactgcttcacgatagtattcaccatagataattcaaagactagatcaccaagacatttataaattgaagtgacccctgaattcctatttttcctaggattttgctgtgttacaaacaaaaagttttgcttaatgtcaaattaaatgaaggataaaatcaacaagaaaacagaaatcaatagttttctataaagcatggaggaaatcaatagaaattggaaggataacttattatctatgttcagagtaatcagagttgagaagaaattctgctattagttaattgacaagggcaaactaatgtgtctcacagatgggattgttatttattatttgatactcaaaggggtattacattcagagcttccagttacaggacccaatagaaagtagcatctgtacacacttcattttaattgaatttggtgttcaaatagaaaataaaagtgagttctatcaaaagacatgaactcttagtctatatgagccccaaaataaggctaatgcccttttcactgtttactatatgttttgaggctatttaaaaacaggcgatattatttcttatctatgcaaatggaacagtagtttctacttttgtctaaatctccctaagacttgatctgtcaggaattttatgtacccatggccagcttcatctgtcttccagacagagtgataaaaagtggaatcacagctaatggagtcccatgcaggtttgtgctttaattaccttcaaaactttgaaatcaggataacctttccaaagagaagtatctctaattttaaatgatgctagtatttcttctagttaccacacttcttttatgtctttagcctgaaaaactgaaagcctttgatacaggaaatgagaaaagccctctgctttcattccaggagttagaagatgaagataatgtcaatgcagctaactgctaatgtagtgaaaggttatgatgcaaatggttttgataaaataaaactcttggtgcctaggtatatagattctaatatacatcattttaaatacagaacttctatagagcaatgttttatctaacaggtaaaattaaagatgtttactgaatatagtttgtgctcaataaaagtttcaacttatgaatacattaaaaaggctagtgcaggttactttttctagagacatttaggttacaaatatgcttttacacaacttcacctattgcattaaattatgcacttatgtttaataagatagcttggttgaacacaggtttgaaaatttgattcttgtttttaaagtccaacttttaaggctttcattatacttttctttagaataaaatcttagaatttttcttttttgctaaaaaaaccatagaacgtctcttctccttgtgttgaaatgaggtccatatggtcaatctgtggataataattgtcctaggtgcaggataatgacctggttgctataggaaaatagaaacaaaatagaatagaatacaggaatcctgacctccgaaactttacattttaaaggaacagccaaggttaacataatagagaaaaaaacacaaatcaaatatattaacaattacatattaataaatctgtgaaaaaacaaaatggataaattctgaaaaaaattacatatatatacacatgctcacaaactctttaagaaaagctaacttttgtaaaagaaatggaagaaaggaagggaagaatgaagcagggagggagagagggaaaaagagaggaaggaaaggagggatctcagtagtgatacacaatactgatttgtttctccattgtgtcacagatgctctgctctatgccatcaatcatggactcaggtttctactatctttttgttccattgctctgtgagtccctgaaggcatcactattcaactgaataattaggaaggagaaggttgaacatggaataattagatcatggaatattgtagggagtgttttctgtgtgcccaggttgggaatagtatagatcactttcactcatattccactggccagaacacagtgccaagacagcccccagtgatcattgcctcctggtcttcacacccttgtgatgtcccctcacattgtatctgtcagaagtgatggtatgacttctaagattagactataagagatttctgcttctatccgaagcttgccttctcttgaatcactcactctgtggaaagcaaactgtcctgttgtgagccgccctagggagaaacctacatattaaggaacttctagtagatatccagcaaggaaccaacaaccaccatgtgagttggctaggaagcagcttctccaattccaggtgagtcttgagatgacagcagcctctgctgacatcttgactgcaacccagtgagagacctgaagccagaaccaagttgctaagccacatggaattcttggatttcttgactgtcaggaactgtgtgagataataactgtgatgatttaaacttctgaggtttgggtaacttattacatagcaagaggtaactaacatgcataacctcacccaactgaaaggaaggctggaaaatgactgccagttgtgtgtccaagaggaaaggagagagggtttagtgtccatagctgtctataccacactgaatatccaccctgggcaggtcttagggtcaatgagacttttaccttcccctcaggagctcctatggacaacacagccacagaggcatcactcaaattctcttcatgctcttagccttttccatttactctgacagccatgcaagtgacctctataaagaatgccagaatcaatggtgcctatggttaccgatctcagtcttacttcctcatagattgatagtgaagattttgatcttgtctaggggaatctaggagcactcagaactccagacttcaagaaatacccctgctctgatgcacacccagatccttgtacttaaccttcatactcaaagactttcttcaggtctttgcaagccaaaagataatccataataggcccagggcaccagaacacattatcctcaggcctggaaccctccagtggattagtcaaagagcaaagatgggataactttatccacctgctttccattggatattgcatagctccataagaatgcaacacatactctgatgggtaatttcttgtgcgaatatttttcaggtaatcacctttcactcaaactctttacctgtaatctttcctgtagctaaaaacactctacaggaaagagaaggatagcagttccaagatggctgaataggaacagctccagtctacagctcccagcatgagcgacacaaaagatgaatgatttctgcatttccaactgaggtaccgggttcatctcactggggactgttggacagtgggtgcagtgcaccaagcatgagtcaatgcagggcgaggcattgcctcacccgaaaagcacaaggggtcagggaattccctttcctagccaaggaaaggggtaacacatggcgcctggaaaatcgggtcactcccaccctaatactgcgcttttccgatggtcttagcaaacagcacaccaggagattatatcccgcacatggctcagagggtcctacgcccacagagccttgctcattgccagcacagcagtctgagatcaaactgcaaggcgaaaatgaggctgggggagggtcacccaccattgctgaggcttgagtaggtaaacaaagcagctgggaagctctaactgggtggatcccaccgcagctcaaggaggcctgcctgcctctgtagattcctacctctgggggcagggcatagccaaacaaaaggcagcagaaacctctgcagacttaaatgtccctgtctgagagctttgaagagagtagtggctctcccaacatgcagctggagatctgagaactgatagactgcctctttaagtgggtccctggcccccgagtagcctaactgggagacaacccctaataggggcagactgacacctcacacagccaggtactcctccgagacaaaacttccagaggaacgatcaggctccaacatttgctgttcaccaatatccactgttctgcagcctccgatgctgatacccagacaaacagggtctggagtggacctctggcaaactccaacagactgcagctgagggtcctgactgttagaaggaaaactaacaaacagaaaggacatccacaccaaaaccccatctgtacgtcaccatcatcaaagaccaaaggtagataaaaccacaaaggtggggataaaacagagcagaaaaactgaaaattctaaaaatcagagcgcctctcctcctgcaagggaacgcagctcctcaccagcaacagaacaaagctggacagagaatgactttgacgagttgagagaagaaggcttcagatgatcaaacttctctgaactaaagaaggaagttcaaacccatggcaaagaagttaaaaaccttgaaaaaagattagacgaatggctaacaagaataaccaatgcagggaagtccttaaaggacctgatgagctgaaaaccatggcacgagaaccacatgacaaatgcacaagcttcagtagccaatttgatcaactggaagaaagggtatcagcgatggaagatcaaatgaatgaaatgaagcgagaagagaagtttagagaaaaaagaataaaaagaaatgaacaaaggctccaagaaatatgggactatgtgaaaagaccaaatctatgtctgattggtgtacctgaaagtgatggggagaatggaaccaagttggaaaacactctgcaggatattatccaggagaacttccccaacctagcaaggcaggccaacattcaaattcaggaaatacagagaatgccacaaagatactccttgagaagaacaactccaagacacataattgtcagattcaccaaagttgaaatgaaggaaaaaatgttaagggcagccagagagaaaggtcgggttacccacaaagggaagcccatcagactaacagctgatctctcggcagaaactctacaagccagaagagagtgggggccgatattcaacattcttaaagaaaagaattttcaaccaagaatttcatatccagccaaactaagcttcataagtgaaggagaaataaaatactttacagacaagcaaatgctgagagattttgtcaccaccaggcctgccctaaaagagcagtgccctgaaggaagcactaaacatggaaaggaacaaccggtaccagccactgcaaaaacatgccaaattgtaaagaccatcaatgctaggaagaaactgcatcaactaatgagcaaaataaccagctaacatcataatgacaggatcaaattcacacataacaatattaaccttaaatgtaaatgggctaaatgctccaatgaaaagacacaccagccaactggatgaagagtcaagacccgtcagtgtgctgtattcaggaaacccatctcatgtgcagagacacacacaggctcaaaataaagggatggaggaagatctaccaagcaaatggaaaacaaaaaaaggcaggggttgcaatcctactctcggataaaacagactttaaaccaacaaagatcaaaagagacaaagaaggccattacataatggtgaagggatcaattcaacaagaagagctaactatcctaaatatatatgcacacaacacaggagcaggcagattcataaagcaagtccttagagacctacaaagagacttagactcccacataataataatgggagactttaacaccccactgtcaacattacagatcaacaagacagaaagttaacaaagatatccaggaattgaactcagctcagcatcaagcagacctaacagacaactacagaactctccaccccaaatcaacagaatatacactcttctcagcaccacatcacacttattccaaaattgaccacatagttggaagtaaagcactcctcagcaaatgtaaaagaacagaaattataacaaactgtctctcagaccacagtgcaatcaaactagaactgaggattaagaaactcactcaaaacctctcaactacatggaaactgaacaacctgctcctgaatgactactgggtacataacgaaatgaaggcagaaataaagatgctctttgaaaccaatgagaacaaagacacaacataccagaatctctgggacacatttaaagcagtgtgtagagggaaatatatagcactaaatgcacacaagagaaagcaggaaagatctaaaattgacaccctaacgtcacaattaaaagaactagaaaagcaagagcaatcgcattcaaaagctagcagaaggcaagaaataactaagatcagagcagaactgaaggagatagagacacaaaaaactcttcaaaaaatcaatgaatccagggactggttttttgaaaagatcaacaaaattgatagacagctagcaagactaataaagaagaagagagagaagaatcaaatagacacaataaaaaatggtaaaggggatatcaccaccaatcccacagaaatacaaactaccatcagagaatactataaacacctctacgcaacacaaataaacaggaaaatctagaagaaatggatacattcctcgacacatacaccctcccaagactaaaccaggaagaagttgaatctctgaatagaccaataacaggatctgaaattgaggcaataattaatagcttaccaaccaaaaaaagtccaggaccagatggattcacagccgaattctaccagagttaaaaggaggagctgttaccattccttctgaaactattccaatcaatagaaaaagagggaatcctccctaactcattttatgaggccagcatcatcctgataccaaagcctgcagagacacaaccaaaaaagagaattttagaccaatatccctgatgaacatcgatgcaaaaatcctcaataaaatattggcaaaccgaatccagcagcacatcaaaaagcttatccaccatgatcaagtgggcttcatccctgggatgtaaggctgcttcaacatacacaaatcaataaacgtaatccagcatataaacagaatcaatgacaaaaaccacatgattatctcaatagatgcagaaaaggcctttgacaaaattcaacaacccttcatgctaaaaactctcaataaattaggtattgacgggatgtatctcaaaataataagagctgtttatgacaaaccctgagccaatatcatactgaatgggcaaaaactggaagtattccctttgaaaactggcacaagacagggatgccctctctcacactcctattcaacatagtgttggaatttctggccaaggcaattaggcaggacaaggaaataaagggtattcaattaggaaaagaggaagtcaaattgttcctgtttgcagaagacatgattgtatatctagaaaaccccatcgtctcagcccaaaatctccttaagctgataagcaacttcagcaaagtctcaggatacaaaatcaatgtgcagaaatcacaagcattcttatacaccaataacagacaaacagagagccaaatcatgagtgaactcccattcacaattgcttcaaagagaataaaatacctaggaatccaacttacaagggatatgaaggacctcttcaaggagaactataaaccactgctcaacaaaataaaagaggatacaaagaaatggaagaacattccatgctcatgggtaggaagaatcaatatcatgaaaatggccatactgcccaaggtaatttatagattcaatgccatccccatcaagctaccaatgactttcttcacagaattggaaaaaactactttaaagttcacatggaaccaaaaaagagcccgcattgccatgtcaatcctaacccaaaagaacaaaattggaggcatcatgctacctgacttcaaactatactaaaaggctacagtaaccaaaacagcatggtactggtaccaaaacagagatatagaccaatggaacagaacagacccctcagaaataatgccacatatctacaactatctgatctttgacaaacctgacaaaaacaagaaatggggaaaggattctctgtttaataaatggtgctgggaaaactggctagccatatgtagaaagctgaaagtggatcccttccttacatcttatacaaaaattaattccagatggattaaagacttacatgttagacctaaaaccatcaaaaccctggaagaaaacctaggcaataccattcaggacataggcatgggcaaggacttcatgtctaaaacaccaaaagcaatggcaacaaaagccaaaactgacaaatgggatctaattaaactaaagagcttgtgcacagcaaaagaaactaccatcagagtgaacaggcaacctacagaatgggagaaaatttttgcaatctactcatctgacaaagggctaatatccagaatctacaaagaacccaaacaaatttacaagaaaaaaacaaagaaccccatcaaaaagtaggcaaaggatatgaacagatatttctcaaaagaagacatttatgcagccaaaaaacacatgaaaaaatgctcatcatcactggccatcagagaaatgcaaatcaaaaccacaatgagataccatctcacaccagttagaatggcaatcattaaaaagtcaggaaacaacaggtgctggagaggatgtggagaaataggaacacttttacactgttggtgggagtagttcaaccactgtggaagtcagtgtggcgactcctcagggatctagaactagaaataccatttgacccagccatcccattactgggtatatatccaaaggattataaatcatgctgctataaagacacatgcatacgtatgtttattgtggcactattcacaatagcaaagacttggaaccaacctaaatgtccatcaaggatagactgggttaagaaaatgtggtacatatacaccatggaatactatgcagccataaaaaatgatgagttcatgtcctttgtagggacatggatgaagctggaaaccatcactctcagcaactatttcaaggacaaaaaaaccacacactgcatcttctcactcataggtgggaattgaacaacgagaacacttggacacaggaaggggaacatcacacagcggggcctgttgtggggtggggggagtggggagggatagcattaggagatatacctaatgtaaatgctgagttaatgggtgtagcacaccaacatggcatatgtatacatacgtaacaaacctgcatgttgtgcacatgtaccataaaacttaaagtataataaaaaaactctagaattcctctatatatttccttcaaataatgcaaatttttggcactacatataaaattattaaaatctttttgatgcccctcagtggcctcttctgtgattttatcatttctccctaaactgatggaaaccatagttcttccaaggacttgatatcaatctttcacatcttaataaaaattgagtttattatgtaaaaagctttgccttgaaatatatattttaaaatttttcatcatacacaagaagttgtagtgacactgttactatcccattcagatcccctctaccatgtagctggttgctgagtgttgtagtggctgtgaatgttggatattattggctctcggctccttacttttctgttgaactgccctgtgcagataggagccaccttgctgtgaagattatgccctcccaccccaggagcagctcacagccaatgactgactaatataggagtataaaatcttccccctttgactcatgaagggataattctgtggtccctgtcatactccagaactccctgtgggatcaaactgaaactaggcttcagttgaaccacttccttgtctagcttcttcccctaccctcttctgctttctccactctctgagagggttctccctcaataaatcgcttgcacaaaagccccatctcggtctctgctccagaaaccctaagaaagaatttttagatattactgcagagaaaaactagcaaaaggaagagtaaatggcttttctatcctctggaaataataatgaaatggactcccattgtgtctatacattgaactagctcagaacattgaggtagttgtcatcacttaccattagggaaaataaaccgacaaaataaaaaaaaaaaaagtaaacaacactaccatcaaaaattgtggctctctccttttatcgttggtactagttcttgttcaaatagaaatcagacaattatcaagtggaaatatagagtttagagtaagaagacctaagctcaccattctcattttataacctggagattttgacttcactaagtctgctttaatttctgtaaaatggggtaaaaatgctttgttatctgtcttttattatagaagcacaaataaataatataggagagtgggaaatgtattactatttttatagcaaaacgtgaatttaataattcaactttgccctttattactaagggcctttaatttctccaacagcattttttagagcctcacattttattgttcatactattgtgtgggtttccttcagagtgaggaattaagactgtcttgaattatggggaagagtttataaacaaagcattgactaagaactgaagtgacttaaaaaatatttaccactgaactttgttatgtgaatgtgtgttctactcatggagaactatacacatattttagtgtgctgccaatctttagcatctttggaagttacatccatcagtgtggaattctcacctgaggcctgctctttcaacaaacattgtctgagggcctgctatgtgactggaaatgtgctaagcgctaggcatgctaattaaaccaaaatttttatttatgattaatatttgtccactgataattaatttgattttcccatgaatagattttcccatgaaatctaacaatcacagggaatcaagtctattagaaaagtctggaactaagaaatagatgattacacttggtatcaaacatgagctaatgattggaatacaatgaaactgatttttccaataaggctggcaaatttgatccaaagtgagttccagactaagggaaaactaatatttattgaacacttaatacgttccaaaaattatattttccaaatatcactttaggggattatctcaaaagcccgtcatctgtacttgccagtgagattcagtgattattacagatgagtttgttaggatttggcagtggcagatacaatctcacatcactctgatgtcaaagtcaaagaccatgttctttcagttacaacagtaacgtatccctgggggtttcaaatgttttatgggcaaaggacataaaattgaaatatttacatagcttcccgaggggaaccacttagaaataaaaaaaacataggggatcagtaagttttgaattgtttatcaaagaacatcattctttttgataagtgtatcttgtacttccatgcaataagaagagcaatttccattccaacaaaagacagcaaattccaactgaaggatgacgagctgagatttacaatggattacccgatgaaaatcactggacagtaactccaaggtgacgggattacaaagtttaaagcacttcaaacctataattgtttgccacattcgtgatttaacttgagggtacctaaaccctatttgttgtaatacagagaatttcccagcactaaaaacaaaaatgtccaaataggtaatatgtttctttgttcttccataacattgtcatcaccaaaacccaatcagccagccctgacacgatatcctcctcttagaatcaaattggggagataatagcaaaaaccatcatttattacaaattcactatgtacattattatatttcatgctcttaatatagctaagaagtggacattattattatacctcttttataggtgaggtttacagaatgtaaggatttttcatataacacatagttttaagcaatgaatgcaggatttgaacccagtggtatccaaccacacatcttcattttttaactattatattataattttatcatcactgcaagaaaagtaaaaataatttttaaaacataaaaaatgaaaataaaggttataaatatcaattaataccaccacagtacaagaagaaaatgggtcacacagtgccaaatatatgggagagtaatgaggacccttggattttgggagtctgagtcagactccacagaaaatggtaaagcattcttgagaagactttttctgtctttaactgaaataataatttatcattcaacacttttcactcttcggtttgtagataaaatttttgtcatgaattaaataatataattgtttgttcaataaatagcaagttacagaagcatgagtgctggcctttcttagcacaatgtcctgccattaacctaccaattgtcctcttcagccccacttttttcttcttgactcaagactggtccagataacggaaccagcaattcagaaaggctcagccacacttatggagcactcctgggtgccaagcattgtgcaaaatgtctcacaaacatcccagtgcgttcttttggtggcccattatctatattttccaaataagggatgtaaaggataaaatacctgagtaacccttagaaaattaagaaaaagttcttcccaaagtttccttttctgaaatcttacgaatcaacctttcttctcgtcttagaaatgagctggatatggctcatttacgatgccagagagagaaaatatactcacttcttggattcttatgtgaggccattccctttccgcccacccactttattttctagggaaagacttgaccatcctctttcctcagttcaacagtggccagtccatgtactggtttgagacaaagcgatgaaaaatcttgcatgtcttgtttttctcatttcaattctccttgggagaatgggattgtagttacggtaaaccaaacattgcttttcggctttcatgagtttagtaaagtctctctttgagtttcttggaggtagagactatatcttattgatttttattcctctagctcctaatttaatatctggtgcattatctatacaccatgagtatgatatgaatttgattctataaaaagtcacttacgtgatttggatgtttaacattatttaacatgggcaagggcactcattttataggaaagataaggcttaaaggaaatcattaccacaaaagtcaggggatccgttaccttcaagttgaaggaaaaatctcccacaggcaaaagataaacaggaactttttgaggcactgtcaatattttatttcttgatttgcatggtaggtacccaaatgctcagttgctaactattatttaaattttcataagcacttttctgtatgctttataaattttatgaaatacatcatacatgtataaaatagatgaagcaaacagacatgtgtttgcacaatttaagggaaattataaaccaaacactacgtaatcaccaaaccacatgtgttactaccaagctaaaatgaaaaagaaaaaaataaaggtgacttaaattaaaatgcccctagacaaagtaattatccgacttaacttccaatgtccatgcacgtgatacttccttgtgaggacaagaaagggagtggcacagtgaatatggaaaaagagtgtcaataatgggattgaaggacaagaggaaatagttcttggttcataggtttgggcagcaaatattctatctatgtgagtgatgaagagatacgtactcctgtcagaaggatggctcctttctcttcataggggataaaagatgagtggaagtcagactagtgaggggagggtgttagatggtggttttgattaacctgataatttcaggtgaaaaatcagatctcccagattaagattatgatgctccaataatgctgtaatattacttaaaggaaaagatggggagctaagtcttggcaattgtcacacaaaaattattgatatattgatcatcttaaaaggttactacgtttataaatcataactgttatggagccatggattggtgggctgctgattggtattacaaactgacatcgatgaactatggtggcttgacatttgttcctttgttcttctctatgagttaatttatgtgacaggctgtgtttttgaaggtctgagctttagaatgaatcagagtaaacaactgccctgcagtaataaaatgcctacacctatttgctgaatgaatccttcttagaaagaggcaattctgaatggaatggctctctacttagaaagctaataattaaacactttttcaccagtggatcaagacccatggttgtgggtgttattatcccctatatagaatatgttccattttcccatgtttaaattcctaagaccaatggaatggaaacatagaattaacctgattgaagcagaaagcattctggagtaaaaacctctcattctcctggtctgtcttaatgggaaatcaaatgtgatttgtgttgtgtggagatgattaccgatgggtaattattctaaaatatctcttttcaaatcctttacatggcaatcaaggaagaatgtgagaggttaggcaatacattaccagggctaacagcagcatataatttcttaattatgcataaaaatgaatagcaatacctactgaaggaggtcttgaatttcctttgtgaagtctggaggacacacaggcctccgagccttattagagaatatgtggttaaaaagacagaagcaaagattcttctttctaataattgtgtgactgaacctcagttttctcatctctaaaataggaataatgatacttttttacttggagctgtggtgtgaattgcattatgtaatgtcacaagctgcttatttttgtgcctagcgtataatacaagacactcaacaaatgatagcccttattatggctgttattattagtagtagtgttactattactacttcttgtactactacttttggctaaggcttacctaattcaggtagaaataaatttaattgaaatgaatgtcacttggatatttcattttgttatgaagttattgacacagttaaaagtaacacacattattaaggtaagttttaaaactgttgtgggagagtctatcataatattttcctaaaagcatcttctgtttcaccatggtaaattattcatcggtttcttttagagtggcatgtgctatttgaatgtggcaaccagctttaaataaattaacgtatttatttacacatcccaacactgcatcctctaattttggggggaaaatatgtacatttaaaaaatctattatgaaggcttgtcaggaacagatgaagtgctatgaattgttactatttgtgttctctttttttttctcagcgtaaaaagagtactttaacattgtgcatcctttcttaaggaatttaagaaattaccaaatcgagcagttggttgaaggagactttaagctctcagctactcaagtagccagtgccacagatttccagctttggaatcacatttatgagcagtgacaaaccaaagcagtacatctacatggtcttgttgccgtgtttgattgagggtgatgaggaatctaataaaagatgttttgtgtaatgagaataacactatacccaacacttcatatagaagcaaagctggactgagagttcaactcccctggtgaggccatatgctaaacaccttcatctctggtgcatctcattcctccttcaccattttcacttccactgtcctaagacctaagaaaactggaagataaaggaaagcatgctacatttttattgactcacaaggaggcaggaacagagatattcctaatcaaaacaatagatggtgactatagattggaagttaggtgaactgtggcccttagaaggaaagaatcagcaactagaagccaaccagcctgagcggagtctcaggcatttctcctagccagaggcttcccattcactctcagatgttcccgctgtaccctgccaggccactaagtcattatcatgggcagagctttgtgtcactgggcctggcatgtggcaaaggagaatcaaagatggaactttgaatgatttgatctcaaaggtgggagagagaggagtccttagttcaatttactcctgccattagtactccagggatagctagaactctagggtccagggaatattgtcaatgaaaaacgagtgtgcagatttacaaacagaaaacgtataggtaaccttttgaaatatgacatttgagaacctcttgtgtctttttattttttggaagagcaaaatctgtttttattttaaacttttataatttgaaactgtaaagagataagtggatgctgaagtctctcagccttgcaacttgaggtttttaagaaactgactcatcaggagatttggacctgtggttcagctttgcgtgtatacacttttgttgctgactttaatgttctttcaagtgcattggccttatctcttctgctagtctggaggctatctggtatctcagatggtgctttttcagtgttagccatagaagctagtattttgtttatagttccattggttgttgacactttagtacagggttcctcaactttagtgtgcatcagaatggtccagtgagactgttacaacagattcctggatcctaattctagagactgaaatgtgttaggtctaggatggagcctaacattctacatttttgacatacccctatcctcctccaagtgatcctcatattgcaggtctttgaactacactagacactttgggtaacattgtcttggagtgttgctgcattctacagtcttcatgttcactttgctctggaagattctagtcttagttataatctattgtttggtctaccaaagtagagatgcaccagattgcacttaaaatccactacacaagtcctcaaggcctcagtaaaaccctctggaagcccttttgtgtctgttattcttgggtctttaagctaacagaacctgagatgcatgtaccttgggatggctgaacagactcactgtagcagtggaagtaggagggacaggagatatgtataaaataccaaatttcagaaatgattagttttgtttttcacagaacacaaaggaatcaatttaaaagactacttgatctcatccctataatttcattctggtgtacaaggaaagtaatacacactgctggaaaggagatgaaacatggctaaattaaagctacgtataatccaaaaatcttttagatctggcttgaaattcaaccataccctcacctattcacagccccattttgggcctggctctgggagatctctaaacataatgagacatttgtggaacaggggtaaggtatgggaaggcagggtgggttatgggagtcaggcaagcttagcttctctgaccctctgttttctcatctggcagatagaaatgttatatacagaaggttcttacaagaatgttattcatacagaggttcttaaaagaacctcaaagagttcttttaagcattgcatgtaaatatgtgtataaacagtataaaatctagaacatcataatgcccagttaatattaggtttttttttagtgatttctgcccataaagttggaaaaacatggggactgaagaaagaaaagattattaaaaattgcaaagtggttaatctcctggcacatgatttattctatttttttaaaggctactgctagctccaaagactggcctagaaactgaagttactggcaacagaaattctaaaaaatggcatcaaattttcaaagtagagggacacatcttggatgttaaagataagaggtataatacggatggaaaatatttatataaagtcttcaatatttgacaattgtccttaggagctcctaaaatttcaaagtaaggtgcaaattatatgtaattgactaataagggagtctgacataatatagcatatggaaaggcagtggaattggaagttgggttttaattcctgttctacccttaaccagccttgtgatcctggtaaagtcacttaacttactgccagtacacacacacacacacacacacacacacacacacacacacacacacacacacactccaggaagaccagctaagtgacttacagcccagaaatattatcctttgttcaaagtcatcaaggatatacttagctatatacttagctaaatattcccatgaaaaaaaatgcttcaaagacaaaatatgagggaaataaagtttcgctattgggatgctgatctttatatgactgtactctgtagctctgaagacagatattttctgaaagtctttccttcttaacttagtcctaggttgctctgctcacaggaggacattaggaggagagtgggtcacttaatccttcatcgaggtaagatctcttctattcatgctatgaaaatgggtctacatcagactgttcactgtaggcagtgcctactgtgtagaaagagctcaataaatgtttgtaaactgaatgatgaaatggatgaatggcaaacaattcaaccccaagaaggttaccccagagagtctatacaaatcaaattgtaaaaattttcaccttgctgattctatgtggacacagcctcaatttcaccagggcctgaagaataattacaatgatcattcatgtctccatgtcgaaataaggcataacattcaaactttcccaaggtgtattattgcacacacttcattttggaaaggttgatatagtaaattagcagctccaccacaaggctaataaggctaatgagaggtattggtaaaattgcagccatagaaaataagacattctttcccatcatgagaagcaaaattgtatagcagaaggccatgcatggaaacacattccgtgacaagcagaccctatcatcatactttttgcaaaagtgttttccctctctcttcatgtattaattattcagtattttgtctttaaaaataacattgagtgtgaattatgtgcatgacactatgataaatagtatgggtgatagataacacataagtcagtttctacctacaagaactgcacagtaagttgaggacataaacatatgcacacaaaatctacacgtgaaatgtctgatggttcctatactaagtagggagaggcctaattactaagatttctgatacctgcaagtatagagtcaagggccaccatgttgggtaggaggaggttggaaaggttgaaaatatgttataataaaaataaacaaagttgaggtggaacatctctggatatctgtgggatcaagtcagttcaataatcatgaggtggagaaagtcgtgggtcatccacagagatgtggcacttgtggtgactaacagtaataataataactgctaagtagagtaaaaggagcactggttttggagtctaatcatgtacattggaactccagttctgtcaattaccatgcaactaaacttgagccaaagctatgagcatcagtttaccaatctgttagtagttgataggtatctatctcagagggatcttcaaaggaaccattgtggcagtatttaaaataagaaaccctttgccagtacacagggaaaaaagaaaaaaattacatttctagtacatgaatgaagtttagaagtgggtactaaaaggaaagcatagaaacactgtctgggtggtgagaggctcagatttgtctcatgcatttggctgaaccagtctagacgaggctgagtcaatagggttacccgtctccaagactgatgtttgaaagataaacaaaaagtcaaataatcctaacacctatcactgccttgtttcagcctgtatgtcccactcaatgtgtttagcttccatttgactagttaacctgctcagagtggaaaactgaattggatcattcagcccttgctatttttatgtttggatcaattcaatttggcaggagacaccgaggaaagtaagcaaatgactgccaaatttccacttatcttggtggaaatatatatacaaatcttagctctgaataaaggtatatctgtgagggggggtattgctaaagggtgaagaagtttctagaaaaagaggcaagagttctctcaggttatcttattcttggagaattttcaccatgcacaatgcatccatctatttaagttatttatgctataaccagcagcctccctggatttcattccacttctgcctcctaaatgacttccgaacctggctcacacttttctttaccatctaataataatgataacgacatctaccaaacaaggcattttgttttacattttacaaaagcattttcacgtaattattcatttaagtcccctaaaaacaatgaaaggttgacattgttatttttactttaaggacaaatgggagactaaatttagaaaatagaaaaagggaaaaatacaaagtcaagggtggaaagaggagggcagcctcctagaattaaaaacaccataggaagtaacactgtccaatggatgttataccccagtggccaccaatttttgatagtttgtgaggttgaagtttgcaccttcttttgagagcctacaaccaaatgttccaagtcttcatactagctcagattggctaataaggacccaagtctcaaatcctacatcatactatctccttgtgcccccatgcttgagatctcaaccctcttatctaataacaagacccatttttgccaaaacatgccattgagtgcaggaggggcaatggtatatggtggtgcatgacagaaaatcctgattgtagagcaaaactatacaaggaagaaaaacaagggcacgaagttgtgtcgggggaaaaaaatgtcaggatgtcaggcactgattagatcacaatgtatttctgcctaaatgcatatcccattaccaaatattttgtgatgcatacaaggttcttaataacactatgtccatccacaaggacttgtttcttgagttcttttcttctgatatctaagaaactaattatcctttgatacacactaaggacagatgggttcaggaaaatgataaacgagtaagagagaaagcctataaacaataatttgacgctgcctctatttcatttgctttgtattagcatccatggcatatatttttctttaaaccaatgtttcttactcaggatatttaattcagatgagtttcttgtccctctgaattcttacttcatctttgcccttttctgccctttacttacaggataaaacttcccacagataggggaatctatcctgtagatctttagagcagagttggttcatgccttcacatgcaaagacaaaaacataacccacagaaacctttctaaatactctatctcaaagtaccctaacacaagtagctgattgccttccccacttctcaccatccttccctttccacccacagcttctcactgaactttatttcctcttccgaggtctttgcccacctttttaatggcagaggtctagaggtggttgttaacttgtaaaacctaagaaacaatccgagagtgaaggtaggaaggcttgatcaccaaaggagaaaacacaagagcctggaagctctccgggtttaggggattggagattcatcttcctctttgtgcaatgggaaaaaagacagagagagagagttgaaagctagatggggttattgggtattgtgatggttaatattgagtgtcaacttgattggattgagggatgcaaagtattgttcctgggtgtgactctgtgggtgttgccaaggaaaattaacatttgagtcagtggactgggaaaggcagacccaccctcaatctgggtggacacaatctaatcagctgccagtgcggccagaataaaagcaggcaaaagaatgtgaaaagattagactggtttagttttttggtctacatctttctcccatgctggatgcctcctgctctcaaacatcggactccaagttcttcagctttggggctcagactggcttccttgctcctcagcttgcagacagcctattgtgggacctcaccctgtgatcgtgtgaggcaatactccttaataaactcccgtttatatatacagctatcctattagttgtgtccctctagagaactctgactaatacaggtatacagtgggacttggtggaaaatggatccagacactatggggaggaagtgggtgcaaggagctagatgaaaataaggatacgtgaggatgtgagagggcttcttcttagaccctggtctggaagctagaatcaagctgggcattgaattggacaacacaactcccccaaataataggtagggaagtcagatgagtgaaagcattttctccaggggagaaaagaggaaatgcagagcgtaagtgcaggcatgggcttaatcaagagcagcactgccccagtaaataaccacaaatattggctgcagctgtggtttacttttattaacccttatgttattccaagtccagaaaatatcttcacagacacagtttctgatgtgtggttctctggtttctagttcatactacaattacacaaagaaagtagaaaaattacatgataaatttttttttgtctctctgtggcaatatgaattattcaccttaaaatttttctttcttcacttaactttggaatgatagaaaaatgttgactttaaaaataaatggagagaattgagagacaagaactccagaagcacctagtctttattcactgatgtgttcttgtcccaattctaccacattacagtaaatggatgccttggaacccttcttaaaatatcaacatttattatttaacatcttttctaaaatgcatgactctactttgggcaaataattaaatctttgatcatttatgtactcatggaggcccagaggcaatccttctaaatgccagtttgtgcataatactgtgacaataaataaaagaaatgtaggatttcagctgcaaatgcatgcctggtcaggcatagagcttcactttgttttgtttttgtaaaaaatcttttgtatatctttattctcatattgattgatttttaggattcattttcctaaagcagagaaaaataaatattgggcgagaactctacattgcagatttttagccaaggaagtttcaattacgtcatgccactctgccatgtgttttccaccaaggcctcctcattacttctcttcactcagggatgccactcctgtttaggtctcattctacctctcgggcaattcctgcccagtctccttgtctctactgcctcatctcaccaacctctaatgcagtcttccagggctcattccaaggagagttttgctgctcatactcactccttatttgatctcatccagtccctttgcattttgatggttcccaaaattacatccccagtcccaacttcccgctaggctcattattccaaccacctgttaagtgcatccattttgagagctaaaaagacatcttaaagcaaacatagcaaaaattaaaccgtggatgtttcttccaaatctgtatctcctatagtcttttcagtaaatggcaagtccattttttcaggtgcttatatccagatcctggagttatccttgactttcactctgcacattcaatccattagaaaaacctgctgcctcagctgtaggatttatctagactctcaccacttctgcctttcactgctaggagccgagtttgcatcaacatcaacagcaatagatgtgtaactctctttcctttctcccttatgctgtgtacacaaaagccagagcaattttttgaaaatgaaagtcacatcatgtcctgctctgtcttaaaccctctactaactcaactcacttgaactaaaattttatggtcctgtgaatctagtcatctgccacctgggttcaacactttcccatcatttacttcagtcctgcctggttgatctccctgctgtttctttgctctgcttcttccttgcggtctttgcacagactgtttgtgctctttgaaatgtcttcccccaggaatatagtttattccttcaggtcccataagcctttgttcaaatgtcacctcatcagagactccttatttaaccaaactatttaaagcagcacccctctgtcctagcctgttttgcattgctataaaggaatacctgaggatgggtaatttataaagacaagaactttatttggctcacagttctgtgggctgtacaagaagcatgacaccagcctctgtttctagtgaagacctaaggaatcttccaattatggcagaaagaaaagaggaaagggagcctcacatggtgagaggaaggaacgaagagtggaggagatgccaagctctttttaacaactggatctggtaactaattgtaagaatgcactcattatgcaggaatggcaccaagctattcatgagggatccaccctatgacccaaacataggtcatatggcagttgcaccaggctccacctcaaacattgggatctcatttcaacatgagacttggaggggaaaattatctgaaccatatcacccttcctgcccactcactctccattctttccctgccttattttatcacatagcccttatttctatccccaggtatatacttcctattttcctatgtattggctacctcctcagtatgatgtcaaatccctatgaataggcactgctagtgttttattcactgatagctccccagtgcctagagcagtgcatgattcataataacgaatcaatacatgaataaattggctttttttttttttgagagggaattttgcttttgttgcccaggctggctcactgcaacctctgtcttccagtttcaagtgactctcctgtctcagcctcctgagtagctgggattacaggctcccaccaccacacctggctaatttttgtatttttagtagagacagtgtttcaccatgttggctaggctggtctctaatttctgacctcatgatctgtccgcctcagcctcccaaagtgctgagattacaggcgtgagccactgtgtcctgccaaattggcctattcttatttaaaaatgtccatgggtaggagatccagagggaaattagaaacccaggattggaaaaagattgtttttgagccttgctcttcaaattgtggcatcacctgggtgctcagttcattcaaaatgcagtttcaggcccccaacccaaacctattggaatagattcttcagttaaatcagtcagttaaaatctaaagttgattttaattgttccaggccacattggtgttatttcatccattttggtgggcattgagatgacatggctgtagctgtatgggcctcctctgtaccctggagcaggtatggacttcaacattgaaattggtagagctcacaaatacacactttaacaagaggttctctagtcacacacactggagtaagaagcactgtactagaatccccaggtgggtctctatctttcctcgatgaaacacctgatcctgtttgaacaaggttgctgattgtctagtatctcacattgggtgatctttcaatgttttctgccttccagaacttgtgacctataaatggttgataaatgagtaaaatgacttgagtcagggaaactaataagaccaggtatcctgctgtcattcaatcttcgacataggaaagacctatccagaagactccgcagggtcttgagagtgatgatattgcactctcaagatcactgtgccctatcaagaagtgagttgccagtttaagccaaacaagtgtccattgagaatcaccacaggctcagccttcccactgtcatgatctgagaagacaggtactgtgtgtaacagaacttaacgttcagagggacagaagggagacaaagcagccgcatgtgcattgcactttattcttctctctggtggtcttgcaaagagcatctcgtctcctggtagctgctataattagtatcttattatcttgtcactgttcaaatttgatttgctaaatcattctgaacttccctgacaggctgctgatgcaaggtcagaaaataacatttcatacttattttaggccagcttccctagaagcagggtctgagatggggatttaaatgcatatgattagttgggagagtgctcttaggagaaaggcggaaagtaggataggacaggagaagaaactcagccaagatgtggttcagctgaggttttatctcagcctgatcctacaggaagctatagagaatgaagggcaccggagaccaagtcgtacgttgaggcaaagaggctggtcctttgaaccctcttgccaatcagctacagattgcccccagaaatttagtgtaaccccataacctcccagatatttctcagtgagacaactcctctagaccaaggtctcagtataaggaggaaagcagttatctggaagcaaacaataatcacagcaacaggggatggggctcctcaggtgaagtgtatcttgacaatacttactagcaattgtttagttattttaggcaaaaacggaaactcttccaattttagatattaatttttttaaatttcattacccttcactgcttcaagttcaatataactattaactcatttaatccccatgacaacccaggaatgtatgcactattgttttcattttattgataaaaaactggaagcactaaaaaccttggatatttgcataaattacacagcagaggtagacatgagattgggcagtctggctccagattcttttttttttttttttttttttttgagacggagtctcactctgtcgcccaggctggagtgcagtggctcgatctccgctcactgcaagctccgcctcccgggttcacgccattctcctgcctcggcctccccagtagctgggactacaggcccccgccaccacgcccagctaatttctttttgtattttcagtagagacggggtttcaccatgttagccaggatggtctcgctctcctgacctcgtgatccgcccgccttagcctcccaaagtgctgggattacaggcgtgagccaccacacccggccctccagattctttattcttagctatgaggtatcaaccgaatgactgccattctgagagaaggcatggcatcatataacctcactcaatgtttgacacattgtaggtgcccattttatgttgcatagatgaaaccaaatgaaacaaatggacaaagagaaacaatcttggatgaaatatggatctcttagatcttgtataggttagcttttgttgcacattaatgtatcttaaaacttagtaacttaaaacaacaaatattaattaactttcagttctgtggattagcaatttgggctagaaacatctgggtgtttctcttgttctttatgggctcattcctgcatttcgtgggtcagctgccagttctttctaggcagctctacctctttgattggttgtctaaaagctggagtatcgggagcaagtgggccatgtgactatgattatctgaccagttgtcttgggcttgtctatctggcatcatggcaagattccaataaggagaattcaagcatgcaagagggcttgaagcctacaataagtattatcataccatcacttctgtttcattcaactggccaaagtcaatcatatgactacctcagattcaaagaatgaaatagacttcatattttggtgggaagagttgctgaatcatattgcaaaaagataagggaactgggaggggaataatttgtaaccattttttgcttttaccacagaatctttctgcatctgttagttatatataaaaatgccatataaacccttccttcatatttagtgctttcttttacatataaaatgtggataatattagattggaaaacttagaaaccaaattactactgttaattggttttaaaatatcagagtaccttctgaaacaacaagcttgcctcttgatgcttatcttttttgcctcggaaaatattgtacaaatatctcattagcagctctagagccctatttgtatatctctattttaaacaaagttaaaatagaataaaatgttggagctcccacctgcccaatctggtacccagttttactctccagagtgaccaaccacaggagtcatctgcatgtatttcctaacgtgatctccctggatgggtgcatattattatactgtcctctttctcacttagcactctgtcttggagagattttcatattagcaaaaacagttttacttcattttaagaaaccgtatagtagtccctccaaagtctagaaatataccataatttacttacttctttgtagatgattatttttattgctcccagatttttgttcctacagcgagtgatggggagtgaatttttttcatatttcattggattcatttatgagagaacatctaggagaattctagaagtgaaatttatgttttaaacatgacttttaaaaaatctgaaagatattgctaaatgaactgcagtgagggtgtgccaagcctaccaattttaaattcccgtaaacaatgcatgacagtaggatttctccacatgctcatagatagtatatattggcaaatatctacattttatcactgttcaactcttgccattttgagaggtgagtatggttacatggttaatttgcatgtttttaaaataaatgaggttatatgcaattccataaatttatagaccatttatatttaattttgttaaatgcctgttcatatttttcatttattttaatattgtgttattgatattgcaaggaaaaaccttatatacatgttttatataataaaaaattaacttttgtgtatggcaaatatggttctggtttttcatactttattgacagatacaatactcacacaggaaaatgcactcatctaaagtacaaagttcaaccaattttgacaaatatgtgcagcaatgtaatcataacccaaataaagatattctttgcttgtttttttgtctacaatccacttcaagttaatatttggtatgatgatagtcaagtatttttttctaggtaaatatgcaattgtttcaatatcatcagtttaaaagtcttttttcccattaagttgtccagaatatttctagtattccggaaatttcctcctgtcttttctagtcaatcacttcacacttctacagaagcagccactattctgacatctaagtatatatactcttttgcatgtggcttctaatatatatgtaacattttcaactgcagcatttttcatcagtagcttgttgcttcttgttttgaagttgctttagtatactttttacagtttgtctattcacctgttgatggacatatgaaacattctgtattttgtactattatgaattaagttgctatgaacattcttatgcatacatttatttctcctgaatatgtacctaaaagtggaataactaagaagtggagtagatgtatttttaacttcatttggattgtcaaactaattctcaaagtgattataccactttatactttcactagcaatgcatgggtatttccaggttctctacatgtcaacactgatgaatttcagtctttatattatttcgccatgtgtatatagtatatctccttgtgatactattttgcatttctttgataattaatgatgttgatcattttctcatgcggttggtggccttttatccatcttttgtggagtatctgtccaaatgttttgcctcttttggttgggttcactttatgttagcattgatttgtagaaattctttgttcaggatgtgagttatttgttatatatattgcacatatttccaaagtctatgatttgcctttccatttttataatggtgtggtttttgattagcatatgattttaattttgataaatcttatttgtgaatttgctttttttaggttagtgcttttttataactttataataaatctttgcttatttttgtctatgagctatttcaaattaatatttgtgtatgataatggtcaagtttttttctatgtaaatatgcaattgttccaacatcatctatttttttcccactaagctgctagatatctgagctctctattttattccatgttatacttgtctatctttacaccacaatcacactgtataaattactgtcaatctttaggaaatcttaaaatcatgtagtctaattcttgattttattcttcacaattattttagtattctagatcttttacatttccatattgatttaaaatcaggttatcgtttccgtaagaaagattcctgcgattttatttgggattgtgttgaacctatagattaatatagggagatttgatatctacaaatttcgagtcattcagtccgctaacatagtatatttctcattttacttaggacttctttaatttttcacagcaatgttttaactgttttcagaatggagatattacatgtaattcattaattagatttctagaatttaatttttgaaattatgaaaatgtcattgttttaaattgtaagtggaagaaattctattcctaacttgctaagggatttacttattaagcattggtgtaaaatttcatgaaatgattttcagtatctattgaggtgatcatatttttcctttatgatattaatttagcacattatattgattgctgatgccaaatcagcttcaataattctgacttggttatggtttacatattgctgaattcaatttgctaaatctttctaaagaatatttatgtcttggttaatgaagtatattagtatttaatttaatttaatttttttctcatgctttgatatcacggtttttctggtctcatataactacaacagctatgtgtatgaaacttgaaaagccaaactgaagaaaaaatatccaatcttgtaagttactatataaaataatatttatgattaatttgaacaatttatgtttaactacttatccagcctttgtctactaatttttaatgtttctgtttaaagacatcatatgttgatgtgtaaagcataaagttttatatgatacagtatttaatttttgaattttgacttctcacacaagaaaaatataaatgagaaatggtagaacaaacttattcttacctcttaacatttttatgaactaatgcctattccctaacttttgttccttgaccccaattagaaaaagaaaaaatatcacagaaaaatagagaaaactgtttcttcaaagaaaccatgaataatattataaagcaaccttctttaagactgcaaaatcccatcctggctaacacagtgaaaacccgtctctactaaaaatacaaaaaaaaaaaattagcagggcgtggtggcggatgcctgtagtcccagctacttgggaggctgaggcagaagaagggcgtgaatctgggaggcggagcttatagtgagccgagatggcgccactgcactccagcctgggtgacagagcgagactccatctcaaaaaaaaaaaaaaaaaaaaaaagaaagactgcaaaatcttgaacaagatgggcagcaataaaaatactgcctggcacttgccactacagtgctgtctggcgtcaaatacagatattctgtattttttgtttttgtttttagagactgggtctcactttgctaccacacccaattaatttttaaatttttttatagtaacaacaggatctcaccattttgcccaagttggtcttcaacttctgggctcaaacgatcctcctgtctggggctcctgaagtgctgggattacaggtgcaagctactctgcccagccaatattctgtattctaaatactgtttttctgaaaggctcgtccaagtgtccatttgttatggtgatgtgattccagaccacaggtgacaacaaattttctttggagttcaaattcaaccatagatttcagggatagattaagaaacaaaaccaaaaaaaacaacagaagagtattcacaatatgagaaaccacaacacaaaccgaaatgagcatcaaaaggaaattgcagactagcctaatggcagtattcgatattggatacaatgggacaaaattctaagagataggagatacagcttgaaatatttgtaccccattatatttttattcgtatataatagctacatgttcaagcatgcaatattggagatcacagcaatcataaaccctgcttatgaaaaaaatatcaagccaatctagaaataaatccaagtttaaaattcaagaatgggggaaaaattcaacataaaagtaaaggtaatggtcattgaatcctctaaactttaaaatcaagatcaaacaataagcagtatattgattataaaatttttggcaatgtaaacataataaacatcaaatatgcatttataatacataaacaccagatatcagagaggagtttggagagaatattctagttcccttatcattcagagaaggggatcaatacagcccgtctaaatttgaaacataaagttaaaaaaaaattactctaacatcttaaagtgcctctaatttaatttgttcatttcatattacttttttggtaattaatgtcaggtggtgaagaaacatttatctgaggttcaatattccttaatttcaatgcaatttccccccccattagatgtaattaaattctaactatgtctaaataagcgtagcattactgtgagataccatctttgtaaaagtatttgtatttttttattattcatcattatatacatgcatatatacatatatatacctgaaataatatacatgcatatctacatatatgcatatatatctgaaataatatgcttaagtgttgacaatgactatctttcagtcgtaaatatggagtgattttgaaaatattttatatttttggaattatacgatttttttatataatggctgtatattatgtgtgtaactatacatgaaatcatcctttcaaaaaattaattacagaaattaatgtaaatgatatttgacttaattaagactgaaaatcatataaattatacaaactagtcaaagatatttaaaaatgtgtatttagagaaaagacaaaggacaaaaacaaacaattcacaaaaaatgaaatattattggctaatacattttaagtaaatagcgcaaattctccagtaatcaaacaaattctaactcaaataagctgacctgtgttttttttttttaacctgctagtaatggtttattgggataggccttcttacattataatgacagaagtatataaattgatagaatttttctgaaatccaatttaaaaacatatgtcagtgttcataatcttttgcaactttgggaacttgagcctgtaaaaatactcaaaaatacaaccaaagatttttgaaaatgaatatgtattacactattctttctagaagtaaaaaagaggaaataattaaatgttcaacgataggagaaagactacaatttataatacataataattatttactgagttcttataaaatgtacaatttgtcaaaagatttgcttatacaatctcattttatccttataatgacacagaggagcagtgaccattcacattttatacttgagagtttgaccatcagagacattaggaaatatagctgagattaccgaactcattggtggtaaggctggattcaatgtggttaaaaaatgaaaattcatcaatattatgtacttccttcctccatagtgatattgtgcatccattttaaatgaaatatattatagaatattaagaagagagatacaaggaagaaagtaaatattactcacaaacccactcagagatatccactgttagggcatttaatttatttctgtctttattcaaatgtaatacttctctcttatatatatagatgcataaaactgagatctaatatataaatattttatattgtctgtccatttactttcacatttcaaatatttcaaattattaaatattatttgaaaattctttttatggaatacattctaatctattttgttattttgttgttatgcaaacctagagttttagaacacctttataaaaacaagtaacattgtgataaacatctttgtcctaaaatgtatctctaaattccttagtatagacgttggaagagaaattactagacccaagggtgcttatttttttaaagacttttcgtatctataaccaaactttaaagaaaataaataccatttatacttgaccagcagtgtttgcagtcaatttcaatgatgactcaacctaatgaacacttgatttaaaatggatgcacaatgttattgcagaggaaggaagtccataatactggggaaaatgaaaaagttttaaaaagaagatagtttgttaggagactctggagcatgcccaccaaaacaacaaaaaaatgccattttacagtaaaggtgccattgcaatgtgatgggaaaatgactatctgttcaataaatggttctgtgacagttggatatccacatggaaaactattcatcttgagtcttaacttacatcctgcataaaacatcaattccagttgtatcatagacccagatgagaagaatgaagcagtaaggtaaaacagtcttgtccagtataaatataacacaggtcctattgaggtataactcacatactctacatccactcattttacgtatataattcaatggtgtttattaggttggtgcaaacataattgctgtttttgcatttacattttatggcaaaagctgcaattctgtttgcactaacttaatattatattcacacagttgtgcaactatcatcacaatcaattttagaacatttttatcacctccctaaaaaacctgtatcattagcagccactccccattgcccccctgccaaatccaccagctttatgcaccactgatctactttctgtctctatagacttgtctattatggatatttcatatacataaaatcattgcaatggggtctcttgtgattttgttttcacttaacgtgttttccaggttcatccatgttgtaacatgaagaaatacactgccattcttttttatggccaaataatattccattatatggatgtatcacattttgcacatccattaatcagttgatgcatatttggatggttaccaatttttaatactataattcatgccactataaacattcaggcacaatttttataaatgcatgtttgcttttctcttaggtataaaactagcagtggaaatgctcggccatgtagtagctctatgcttaatatgtgaggagcttccaggttgttttaccactaatatatgaatgttctcatctttccacattctagccaacatgtgttttcttccttttttattctagctattctaatgtgggcaaagtaggatcaaatttttgttttgactaagtttccatgatgactaatgctgtagtttgaatatctgcttcttcttaaactcatgttgaaatctaattattttaacaatagtaagaggtaggacttttaagaggttaggccatgagggctctaacctcatgaacaggttaagactgtcatcacaggagtgggtttgttatcataagagtgggtttcttataaaaggatgaagttggctccttttttcccatcccttcctttcctcttgctgcccccacaactccttctccctcttccccctctctctctctttttctctctccttccctttttgccctctatctcctttcatcatgggattatgtaacaaagaggaacccttgccagatgtgttcccttagtcttagacttcacagcctctagaattgttagccagtaagtttctatctgatatggtttggatgcttatccccttcaaatctcatgttggaatgtagtccccagtgttggaagtggggcctggtgggagctgattggatcatggggacagacacttacgtatggtttagcagcatccccttggtgatacgtgagttccactcagttagttcatgagatctggtttttaaaagagtctgggacctctcctttctccttctgtcttgctcccactctcatgtgatacaccagcttccccctttgccttctgccatgattgtaagcttcctgaggccctcaccagaagtccagcagatgttgggactgtgcttgtacagccttcagaacagtgaggcaattaaacctctcctttttttaattgcccagcctcaagtatttctttataggaatgcaaaaaatggcctaacacactgttcatgaaaaatcaggtactatggtacagcagcataaaactgactaagacagctgataatgctgagcatctttcatgtgcttatggagcacagtacaatgggtcatcatatcatgataaattcacgagtggaatactaagcagcaatataaaagaacagacagcacatgaaggcaggagtataaatagtgctcatagacacaatgtttaggaaaacatgccagatgtaaaaacatatctattgtattattccatatatatgaaccaaaagaaaaagtaaatagatatatagcaacagcagtcagaataatgggtaccttgtggaggtattgagtgtgaggcagtatgaggaaagcttttatgctgctggcaatatccttcatcttgatctgtgtgatgattgcgggaaggtaagcgtaagtacaatttcatcaggtggtgctcctaagatttgcgcatcctactgcattcacattacacctcaacacaatttttaaaaaatttaaaggcataatatgaggtaataaaagattcccctaggtcaaacaacccaggagtgataggaataaaaatttaatgatgtagaagataagtcattttagggaaataaagatttttggactagagcctgatacagacttttctaagctgttttatctatcattttttagccaatttagtttgaatttaaattatctttatattataggagttatgacagataaattgcttccatgatttgaaatctccagatatatttaagggcaggaagaaaacaatttctataatgagaaaaaaaaaaaaaaaaccctttctgcctcaaacttaaaaaataagaaggcacttactggcgcttttcctttaactttaacgtgccctgcatgggggaaccctcttttcatataatttaatgatgcaggaagactcttcatgagtgacaaaccagtgtgctgtatataaggttcagaagaaagaagaaagagtaaagggactggtttatgccataaaagatccagaaacatttatcctttgagagctggtctagaaaaagaaaaaatgatggtgaagaaataaacttagatatggcacaaaaggagcaactagtacttattgttatggacagtagtctttaaagcaaccactggctcttatatatgactggatagagaaggaaaaaaattaagtaggtcagattatttacagagactcggaaggtatccatctagttccatgttccacggggcaattatttacacctcattatcttaggacagattctctagaagcagaacctgaaacaggaattcctttgcaagggatttcctgagggagtgctctcaggtaaaattggtagggggatgagggaggcatagtaagaagtcaggtatgagtatgggtcaagcataattgacccatactcagacccaaaatcactcagcctagggaaggagaatcccatggggagggccagggtgacaaaaattctccgtttgacgaaaatctagtcaggctcctttgaattctcttctcaaccagcccttgactttcggttttctaggtttgtttctgaattgttcaattttagcaagaatcctgctaagtcaattgagccagaattcctcatctttggtatcttatcactctcaatatgtgatcaggcttctcattctccaccatcttccaggtaatatctaatcaccctggcctgtctttaacaagaatcttgtcaggttgtttaaccagaatctcccccaactctgatttttttttctcttagtaattgttcactcattgacccccaaccctgctcctttggcaataaattcctattttcccttgttgtattcagagtcgagcctcatctctctctgtcactgcaaaacccaattgcagtggtccataccatgatggtcctaaattaagtatgtcttactgttccttgcaagactcgtggataattttttaacacgagacaaggatgtaaatactcaggagaacaggcaacagtgagctgttagcagcttatgtgctcagaagctggggaatgagggaactagccagataaaatgaatgcacaaggagtgccagtagcattttggtgtcctccagaaaagggaagttggagacttaaccttactcctgcttgcttatctaccaggttgtaccactcaaactttagccatttgcaaattgcactcatatcattttggtatatatatataatcatctaattaatacttttctttaaatggactctattttttcttgactggattacacttttgacaagcaataatgcctgaaactatatgtttggttgctgcatttttagtacatcattaaaaacatgtacaattatgaatatttaaacacaatgtatggaagtgatctaaatgcctctgttaaatcactagtggtacaagtgccatcatctgtggaacaatagtttaagggatgccacatggtatacatgttctcaaaatatgcccctcattgtagaaaacttcttatggtgtctgaagttaccaccctgaagaccaatctttgcattgaggtattgcctttaaaagatactatgttgaaatgtgtaaatatatcaacagaaagggataaacattatcaggcatgatcacagtcaatcttaccccttgtacatagcagggctctcagggaatgaaatattggagagataaattttaatatttgaagttaagagatcatagatcctgcccaggatggcatgctggtgtaggattcaacagagttagataagagaatgagaataatagaacctatatacataacagatgctgagaagtgatcatgatgtcaaagtctccaaatctagcctggctaacacttcaaactacggtgatcaatactaattggcattagtgaaaagttaaacatgtagattaatgaaacagaatagaaagcatacatatacagtcaattagttcataacaaaattactaagggaatagagaaggcaaaggaaaatctctgcaatgaatggtgctggatcagctggaaattcatttgaaatgggaaaaaaattgatcttgataattacttgacaatatatacaaaaacatcaacattattcattatcataagtataaagcataaaactataaaacttctaaaataaaacaggaaaactatttgtgaccattgggtaagcttaattgtttatatcataaaaaggatagaaaaaagctgggtaaaatggactgcattttttttaaaaaaaaacctctttaaaatatattatgaaaacaaaaaggcaagtcgcagagtgagaaaatatccgggatgtacaaaacaactcttataaatcaataagaagacacctaacctaatacaatatgggcaaacatttgaatagaggcttcactgaagaagatatgcaaatgacaagtacacacataaaaagatgctcaatatctttagtcatcagggaaatgcaaactaaaaccacaaagagacaccaatatataactgttaggcaaagaggaaccggagggttctgatttaacttttggggggtttctttctatattcaatagcaggtcttttcaattttcaagggcaaatgtaagcaggaatcattagcaagccaactcataggggaagggagcatacatgatttcattaggccaatttaaaaaatgataattctaaagatgttatttttcatctctttcataatgaacttggaagactcgggatgctgttttgtgtgtcatttcaggctgggataatgggctcccctgggccttgcctcagtcatgctgcctcactctctggcagggaaacaaatgacaccaactcacacttctggctttgtcacatccatgcctgaagatgcttttatgtaggtgattctggaaatggggagatttaagttcagctgctctaataattgtctcagagaagcaggatatttagatgtcggattgtgaggctgagaggagaaagaagatgaagcttattactaaataaatgtcctgcttctgctgatgggatagatacatcatcatcccagctgtcacctgtcaccactaaatgagagtgtgtttctcatgcttcacttagcaggctttcaggactggctgagctcgagcctggctaggatttatagactgtttaaagtctctaaagcggagttcataataaatcccaccacaaagccaggccaggaatgaagggagccaggttatttcagggctttgtgaaggggataaagttaagatcaatactgcagaaaggagctggagaaaggaaagaagaaaggcagacattttctggagattaatctgcatggatttttctgttttttgtgtgagcctcactagctgcaggcaaatcactatcatcaccaccataatcatcatcaagaaaaaccacaaaaggtaatggaaactgagtaagcatccaagaaattgagaagagttttcaaggagagctggggcaggaaataaaagagtccattttgagtctaggcattgttacagcccttctcgtctagaggtagatacctgtggtcactagaaagaagctgtggcatgaaagagatgtgattcttccttgcactcaattagaatgttctgcatttgaacgtgtaggtaactattacaaaagcaagcagcttatctgatcttgaaagcctttctgagcagtctgagttaggagaagccctcacgtcaaacttgtcttctctcatctttcttgagatatgaatgtcaacactaacaacagtgtacactcaaaaagtggagagaaatcctcaaggtgcctgctagagagtgtaggtagattccgggtcccatgtagtgcagcaagagggcaggcagatatgaacaggtataaactatacagtgtggcaggaactggagcataggtaggcacagggaaccatccaaattactcctgtgaggagggtgagacagagtagagagaggtgtgtgtgaaggatggatggggcataacatgacaggagaggaggatgggacatgagcctgagaggatccagaggccagatcatgaaagagcttcacatccatgctcaggagattaaactttatgctagaaataatggggagacatggggaagtcttaagccataggaaggttttaagattattataagcagatgattgattgtatttacagtgtggagaatggattggaaggaagcaaagataaatatagggagactagtaaagatgggtacactgatccagattagaaatgacaatgaacagacctgctaaagaggcaaatggaaaaaagaaaaaaagtggatcgattcaaggaggcaggaaaggtatggatttgcagttagttgattggttactgtgttgctgtattttgctatttgctattcacattcgtgggaaatccaatacttctgactaaggtctctattcaccagtatgtccaagaaaccttagagagcatcctcatgcttctctccttgaagctggaggacttggtaacatgacagaaagctgggtcatctgagctaggaggatctattatgccactgctgctacctctaagtactagaaaccttgggattacaaataaaaactagtcaagaatcctagctaagaaaaattgtcctgtctccatgactgcagctactgtcacctttatctgatcccctattgtgtccaaagcaatgtgagctttcactctgtcctctcagccattggtataaagcactgctgaagctatgaagctacagtgattttgtgtgtgtgtgtgtgttttaccagccccagtggtaattttctcagctaaaaatgcaaatgggcctcaaaaaaaattgacctgggctcacaacatcaaatttattttgattcaatcacattgtcttttcctcagattgtatgaatgtcccataaactgtgatggaagagtttccattctgccatctcatgaagccagagaaaccatgaggtgatgatttgtgtgcaagtggtacttattaagaaagcgtggggaaaagaaaacaataagactggagcggggaaggagaagaagccaagcaagggtgttgtttcaggcaaaaccccatcttagcctgatgctacaaggaactctggagtagaagttacaccccatagtttacctggactcaagggagaggagctgggcttttaggatgtgcgtactcattggccatgccaggggatgtacccagacgcttccagatctctgctagtaatgtgggcagacaggcttcagtagcctaaggacagtcctgcaatgaagatcacaggtatgcaccttagggctagaacccacagaggctgaggaacaggcacatagagagagtaggaggaaccggagcaatacgaggaggtgcaccgtaccttgtcttaagcacaaaatggcccactccatagtcttctagtctcataatgcttttattataggtgccttattgccttcattggcactggaaattgtgtcatatttatttatttatttgtttttacccaaccacattctaaagttttgaacttgagggaagaaggtgatgggctttcgatgattcatctcccaaaacaccctgaactccttatgcaaataactctgaactccttttgcctataattttcaatctttacatttcaatagtgtctttctcatatacatccaacattgaagttcccacctcatcagaactctggttaccattgcatttagaggaaaagaagagtgtagaatgatactcatctgatgggtcccagagcactgatttctctttgctgacagcaaccaaggagcagactcatgggtctgagctccttgtaggcactttccctagtttatacagcttaaaaggaaagaaactgatgcattgggtgatactcctggacttcctgcagaacatgagagagctgttagagaatcacagaaaggactttggacccaggctccttttctgaaactgaggatgtaaaggaaagcagggtagtgtatttgttgccctaaggtacatggttcctacaatcacagagtaattagagctggaacagaaccatgaggtcatctgattactaccctctagttacaaagaaagatactacctttcataaaaatctttgagacttttaaaattgatttctgtttgcctcacaaatattgtccaaatatactgagctactctgtgctgtttgtagttagttgtcaatctatgaatgtttactattctcataagccttgaaggaattcaaataattattttttcaagaaaacttgaggcaaaataccagcacatataccaatgagtacaatgacaacaaaaccacatctttctggctgtagaatatcagcatgtccaacaccccagctcagggaccagactcagctcccagcttctattctcagcattcccagttccaagactgcttagctctgtggtccttggacaagttatttaacctttctaacaatttcctcatctgtacaataaagataacattaggattttccttacagatttgcttatgggtaaaagttcataacgtatgtaaagtcttcagcacaaacaattatctggaatataagtattctaataatggttgttattatcattaacttttccacatattttccattatgaattcataattcacacacctaaaattcatcattttaaaatgtactattcagtgatttttagcattttcacaaaattgtgccactatcagccctatctaattccagaacatcatcgcccacaaaagaaccctcatgctctttattagtcactctccattctaccctccccagcccctggcaactatttactttctgcacttgtagatttgctcatgctagattttttcacataaatgaaattatgcaacacatggccttttgtttctgacttcttttaggtatcattatgttcttaagtgtcatccatgtagcagcatgtcaccacttctttcggttttatggccaaaaattattcagttatatggatatattaggttttgtttattcactcatcaattgatgggtatttaggttatttctactttttggctattatgaataatgttgtaatgaacatttctgtacaagtctttgtatgaatatatattttcaattttcttgggtagactccttggagcggaattgttggtcatatggtaattccacacttaacattttgagacactgcttaactgtctaaaacatcagcaccatttaacattttgaccagcaatgtacaagggttccaatttctccatatcctcttcaacacttgtggttatctggtctatcaattatagccattctaggggatgtaaagtggtatcaaattatggtcttaatttgcattttcctaatgattaatgatgttaagtatttttcctgccctagttgttcatttttataccttctttagaaaagtgtctatttagtaccttagccctttttaattaggtttgcttgtctttttattgtagagttataagaatttcacacatttttatttttatttttttaaatgagccaggtgtcattccagaagctgcagacataaagatgaaagtataggtaaatccccatttcattaacttacatactagtgaaggtgcagataataaaaaaaacaaacaagtaaatgagcaagaaaactgtctgagaacaataaatgcaataaaggaaaatctgagggatatatcggtgacagatgcagggagaacagcacaagatgtggtagtcagaagggaatatactttaagttcagatctacagcaataaacagaaacagccacagcaagctaagctttctattgaaaatatgtaccaggatttcagcagcataggaacaaaaaagaatttgtatttaaaataaaatgtaaccatcatcaaaagagccccttttagcttagtaatgtcactgatagagtttttggccaacttggtcctgaaatctgcaattacaggaaaatatgtaatcttcgataaaaatttctttcacaagttattcaggtaggcaaattttgtcttgatgtatttctgaaaaaaaattggacctcttgaattcaaggtttatacagtgttattttttagcagtttattgagttcatacatatttactaagtacatacaattcaagccttgtcctcaccagtaatgaggccaaagaacaaggcataatgttaaattatcctcttcattaagacaacaaatagcaaggaaagaattaggcattcaacaatgtcagagataagttttatgctcctaatattgaactttctttgaaatcattttccaaagcaaatccataaaatatgaggtgaccgtgtttcctatttgcaaacaatgcataaaacataaagtaacaggcacaatattcacattttaaaaatgcaatttggaaagtagtgctcccttgcttgctttgaaaccagctgccagaggatatgaataacaagatcagaaaaatccaataaaggctaagtgtgcttgtgggtaattttcctttcttttgggggcagttctacttagatgaaggacagatacctgaaaccaatgcatacatttcactggaatataagccaaaaaaatggtcctccattcagaaattcaatgtaatgaaatgtgaactattcaactgaacgttcaacaacaccttattgtgaaggccagtgtttctactaaattaagagcagaaattcataactagaagttaacacaaatgtcttaggaataactaaaatatgaaaagtaccatccattattaggatccattaaacactgaattattaaactgctatttattggatgcttaccttgtaccagataccatctataggtgctggggcacaaaaatgaggaagaaatgacaccctgctcttagtaagcttacattctagcagaagattcagataacaaacaaataaacatgaaactgtggaatgtaataaatgatacatttattacactcattcattatgcataatgataggaggggttgagtgggggcaacattaaatagggtgattagaaaatatctgcatgagattgcacaaatatgacatgagatttgaaagactacacttgaaaccaatcttttatgttatgtttttaatattcttcatgtgttgtttaacattctttgtggcgattaaagaatgaagtccagcttgtgttgtttttccctacttttctatctctatcattagtattatgcctaccaaaaaaggctttggtatttgtggggaagatggcagataggaggcaggaatagcatgcagctcccacttggacagacagagcagtgtgtggaacatcacgtcgcaaacttttgctccaagaactaccacaggaacacaccaggaatgctgagagaatccacagaccctttgaaggatctggatggccactgcaggctccctgagatgctgaaaaactgtgagtctgcttgctttctcagtggggaggttggtgttctggagcaatttctcagccctggtcaccagctgcctggaagtagactgggtgctgttgcagaggcccagtggaagtgagactggcctttaggattgcaggccacatgggagaaggtgaggcctgtgactgccagcttttccctacttccctggcaacctgtatgactcagcagaggcaaccataatccccctgggaacataactccattggcctaagaacaacactcccatctgccacagcagctgcagcaaacctgtccaaggagaagctgagctcagacatgcctatccctgccccaacctggtggtctttctacacctgccctcgttgccaaagacaaaggatataatctcttgggaactctatggccctgtccaccacctgagaaacctgaatacttaaccaggggaccctagggaaagtttgcttccttcctatagtatggcagctgatgcactcttgaaagtgccaactcctggctggaggcaaccaacataaaaccagtgcactaaagaaaaacacaaccagggactctcacagagtccacttcactcccctgctacctccaccaaagcagctgctggtatgcatggctgaaatacctgaagacgcatcacatcacaggactctgcagacactccccagtactagcctgcagtctggtagctctgcaggtggctaaacccagaaaagcaaaaacagtcactgcagtttggctctcaggaagccccatctctaggggaacaggtaaagcaccacataaagggagcacccaatggaacaaaagaatctgaacagcagcgcttgagtcccagatcttccctctaacatagtctaccaaaatgagaatgaatcagaaaaacaattctgttaatataacaaaacaaggttttttttaatactgccaaaagatcacagcagctcactagcaatggatccaaaccaagatgaaatctctaaattgccagaagaagaattcaggttgattattaagcgaatcaaggagacaccagagaaaggtgaagttcgacttaaagaaattgaaaacatgatacaggatatgaaagaaaaaatcttcagtgaaatggatagcataaataaaaggcaatcacaacttctggaaatcaaaaacacacttagagaaatgcaaaatgatgcactggtatgtctcagcaatacaatcaaacaaaagaagaaagaaattcagagctcgaggacaaggcttttgaattaacccaatccatcaaagacaaagaaaaataattgtaaaaaaattaacaaagccaccaagaattgtgggactatgttaggcatccaaacctgagaataattgctgttcccaaggataaagaaaactctaaaagtgtggaaaacataattgaaggaataattgagggaaatttccctggccttgccagaaacctagacatccaaatacaagaagcttaaagaacacctgggaaattcatcacaagaagattataatgtaggaacatagtgatcaggatagataagtcaagatgaaggaaagaatcttaatagctttaaggcaaaagcatcaggtaaccaataaaggaaaacctagtagataaatagcagatttctcagcagaagctctacaagctagaacagattggagtcttatttttagcctccttaaacaaaacaattatcagccaagaattttgtatctagcaaaactaagcttcataaatgaaggagagatagttttttccagacaagcaaatcctgagagaatttgttactactaagtcagccctacaagaactactaaaaggagctctaaatcttgaaacaaatccaaaaaatacaccaaaatagaaccttcttaaagcacaaattccataggacctatataacaataacacaatgaaaaaaacccaaggtattcagagaataaatagcatgatgaatagaatagtacatcacatctcaatattaacatagaatgtaaatggcctaaatgctccatttaaaagatacagaatgacagaatggataagaagtcaccaaccaagtttctgctgtcttcaagagacttacctaatacacaaggactcacataaacttaaggtaaaggggtggaaaaagatactccatgcaaatggacaccaaaagtgagcaggagtagctattcttatatcagacagactttaaagcaatagcttaaaaaaaaagacaaagaaggacattatacaatgataaaagaactagtccaacaggaaaatatcacaatcctaaatatatatgcacctaacactggagctcccaaatgtataaaacaattactactggacttaagaatgagataggcaccaacacaataatagtgggggactgtgatactctagtgacagaactagacaggtcatcaagacagaaagtaaacaaaaaaacaatggacctaaactgtaccctacaacaaatgaacttaacagatataaacaacacattctacccaacaactttggaatatacattctattcatcaacacatggaatattcagatattaacaaaactttctacccaacaactgcagaatatacattctattcatcagctcatggaatattctccaagatagaccatatgataggccacaaaacaagtctcagcaagtttaagagaactgaaattatatcaagtagtctctcagaccacagcagaataacattggaaatcaactctgaagcaagcattcaaaaccatgcaaatacatagaagttaaatatcctgcccctgaatgatcattaggtcaacaaagaaataaagatggaaattgaaaaattatttgaacagaatgataatagtgacacaacctatcaaaacctatgggatacagaaagatggtgctaggaggaaagttcatagctttaaatgcttatgttaaaaagcctgaaagagcacaaatagacaatctaaggtcacacctcacagaacgggagaaacaagaacaagaacaatccaaacccaaacccagtagaagaaaagaaatagtgaagactagagcagaactgaatgaaattgaaacaaaaaaaaatacaaaagataaatgaaacaaaaagctggttctttgaaaagataaataaaattgatagcccattagtgagattaaccaagaaaagaagagagaagatccaaataagctcaattagaaatgaaatgggagatattactactagtacaacagaaatacaaaagatcattcaaggctactatgaacacctttatgcacataaactagaaaagctagaggagatggataaatacctggaaatatataacccacctagattaaaccaggaagatatagaaatttggaacagaccaataacaaccactgagattgaaatggtaataaaaaaatattgtcaacagaaaaatgttcagaaccagatggattcacggctgaattctatcagacattcaaagaattggtctttgaatatggaccttggaatatggacaatattccacaggatagaaaaagagaaaatcctccctaaatcagtctatgaagccagcatcaccctaataccaaaacctaggaagggcataaccaaaaaaaaaaaggaaactacagaccaatatccctgatgaacatagctgcaaaaatcatcaacaaaatactagctaactgaatccaacagcatatcaaaaacataatccccccgatcaagtgggtttcatacgagggatgcagggatggtttaacaaccacaagtcaataaatatgatacaccacataacagaattaaaaaatcatacgagcatctcaatagatgcagaaaaagcacttgacaaaatccctcctccttttatgattaaaccctcagcaagatcagcatagaagagacatatcttgatgtaataaaagccatctatgacaaacccacagccaatgtaatactgaacagggaaaagttgaaagcatttcccctgaatacaagacaaggattctgattcttaccacttctattcaacatagtactggaagtcctagccagagaaatcagacaagagaaagaaacaaagggcatccaaatcagtaaagaggaaggcaaattgttgctgtttgctgatgatacaattgtacacctagaaaaccctaaacactcccccaaaaagctcctagaactggtaaatgaattcagcaatgtttcaggatacaaaattaatgtacacaaatcagtagctcttctatacaccaacagaggacaagctgagaatcaaatcaaaaattcaaccccttttacaatagctgcaaaaacaaacaaacaaacaaaaaacccttgggaatatacctaaccaaggagatgaaaggtctctacaaggaaagctacaatacactgctgaaagaaattatagatgacacaaggaagtagaaatacatcccatgctcatggatggttagaatcaatattgtgaaaatggttttacagttccaagtcttacatttaagtttttaatccatttccagttgatttttatatggtttgagataagggtctaatttcattcttctgcatgtgagtatccacttgtcccaacaccatttcttaaagaaactgtgccttcgccattgagtgtttttggcatctttttgttaaaccagttaaacataaatgcatgggtttgtttctgtactgccaactctgttccattggtctatgtgtctgattttatgctagtaccatgctgtttgctattgctgtgtagaatattttgaagtcagacagtatggtatcttcagctttgttcttcctgttcaagtttgtttgggataattggggtcttttgtggtaccatacaaattttaaaattgttttttctatttctgtgaggaatacaaattttaaaattgttttttctatttctgtgaggaatattagtattttgctaggcattgcactggattgccctgggtagtatagacactttaataatattagttattttatctattctgtgaacagtttttcagaatagcttcccatttatttgtgtcttcttcaatttctttcatcaatattttatagttttcattgtgtaggtctttcatgtcttaggtaaattttattcctattttatttagttttgtagttattgaaaatgatagtgttcatttctttttttggatagttcattgttactgcacaaaaactatactgatttttatattgattttctatcttgcagcttaactgaatttattagttctaattgctttttgctgaaacctttataattttacaagtacaaattttagtgtctgaaaacagggataatttaatttcttcttttttaatttggatatatttttccttcttcctgcttaattgctctggctagaacttccagtgctatgtttactagaagtgatgagagttggcatccatgtctcatttctgatcttaaaggaagttttcgatttttcagtgttgagtatgatgttagctataggtttgacatatatagtatttgttgtgttgaagtacattcttcatatatctgattttctgtgattcttttcatgaaagtatgtataatttcatcaaatgtttttcctcattcacattctgtaaatgtggtatatcacatttatagatttgtgtacattgaaccaatcttgatttcctgggtaaacccagatttatcatggtaaataatcttttgaatgcactgctgaatttggtttgctagtctttcgttaaagatttttgcttctgtgttcatcagagatattgtaattttctatttttgtattatccttctttggctttggtatcaatcagattaatgctggccccataaaatgagttcgaaagtagagtaatccctcttctttaactttttgaaagagtttaagaacaatttttactattttttctttaaatgtatggtagaattcggcagtgaagtcatcaggtcctggactttttgttcatagtagatattttgttactgaattaatctccttacttcttattaatctgtttatatattctgtttcttcatgcttcggttttggtaggttgtatttctagaaatttatccatttttctaggttatacagtttgttggtgtataattgtttatagtagttttttataatcttttttatttctgtgatattagttgttatgtttcctttttcatttttgattttattttagttgtctccctcttttagtctagctaaagctttattttgtttatcttttcaaaaaactaaatctttgttttactgaactcttctctcggttttttagtctctatttattttgtttgtgctctgatctttattatttcttttcttatactaacgttaagtttgttcttatgtttctagttccttgaggtgtaacattagattgtttatttgaaatatttcttcttttttggtgtaggtatttcaaactataaacttttttcttagaaatgttttggcttcatcttataagtttcggtatgttatatgctcatttttccatttcaagatattttaattttttctttgatccattggttgttcaaaagcaatttaatttctatatatgtttgaatttctaaattttttttattattgatttctagttttatatcattgtagatggaaaagatgcctgatatgatttcaatcttcttaattttttaagatttgttttgtggcctaacgtatgatgtagcctgaagaatgttccacgtcaacttgagaagaactctgttgctgttttatcaaatattatgtatatgtctgtcatgtttatttggtttaaactgtagtttaagtcttatgtttctttactgtttttctttctggattatctgtgcattgctgatgtggagctttgaaatcctatgctattattattttaaatttttgtagttacatagtaggtgtatatatttatgggatacatgagatgttttgatacaggcatgcaatgtgaaataatcacatcatgaggaatggcataatcatctcttaagcatttatcctttgtgttgcaaacaatccaattgcactatattttaaaatgtacaattaagttattattgactatagttaccctactgtgctactaaattgtcggtcttattcatcctaatatttttatacccattaatcatccccatctctacctcccccaccaccctcaggtccccactacccttctcagcctctggtaaccatccttctactctctatgtagggatacagtaagagtgtttcctttagtatttcttgtaggataggtctggtattgataaaagttctgagcttttgtttgtctgagaagtctttgtttcttcttcatgtttgaaggatattttcactggatggaattttctaaggtaatttttttttttcttttaaatatgttatgccactctctcctggcctgtaaggtttccactgaaaagtctgctgccagacatattggagctcgattgtatgttatttgtttcttttctcttgcttttagaattttgtttttttccttgacctttgggagtttgattattaaatgccctgaggtagtcttctttgggttgaatctgcttggtgttctataattttcttgtacttgaaaattgatatatttctccaggtttcggaagttatctcttattatcactttgaataaactttttacccctatctctttctctgcctcctctttaaggccaataactcttagatttgctcctttgaggctattttctagatcctataggcttgcttccttttaaaattttttttcttttgtctctcctgactgtgtattttcaaattcttctcaagctcactagttttgttttatatgcttgatcaagtctgctattaaaggactctgatgcattcttcagtatgctaattgcatttctcagttgcagaatttgtgcttgattctttttaattattttaatctctttgttaaatttatgtgaaagaattctgaattttttctgtgttatcttgaatttttttgagtttcctcaacacagctattttgaattctttgtctgaaaggtcacatatctctgtctccaggattggtcgcttgtgccttatttagttcatttggtgaggttatgttttcctggatagtgttgacaccagtagatgctggtgtctaactctttggtgtctctttggtgtctaagctctttggtgtctaagcattgaagaggcaggtatttattgtagtaatcactgtattggcttatgtgtagctatccttcttgggaagcctttccagatatttgaaaaaaacttgggtgttgtgaactaagctgaatctactttagcgggcaccccaagcccagtaaattggtggttcttcgggacttctagaggtactgccttgatggtcttagacaagatgcaggagaattctctggattaccaggcagagattcttgttctcttcttttactttctcccaaacatacagagtctctctctctctctctattctgagccacctaaagctggaggtggagtgacacaatcaccctggtggccatcactactatgacttcactgggtcagacctaaaaccagcgcagcactgggtctcacccaaggcctactataaccactccctggtgactgcctatgttcactcaagaccctggggctctacaaccagcaggtggcaaagccagccaggcctttatctttcacttcaggaaggagaggtcccccagcccttgggtgtatccagaagtgccatctaggagtcaggggctagagtcaaaaaccgcagaattgtacctggtattctactgtactgtggctgagttgacactcaaaagagaagatgtagtccttcccctctccaaaggcagaggagcctcatcccacagccactgccaacccaggtcactactgccaatattcccttaagatgcaatctctcttcaatcagtttgttgtgaatgctgcttggcctgggattcacccttcagggcagtggattctcctctggtccaggtcaggtccagaatgccatccaagagtcaagtcctggaatagccaacctcaagatcccatttggtgttttatccccctgtggctgtgctggtacctaaggtgcaagacaaagtctccttcacttttccctctgcttttcccaagaagaaggaattttaccctatagccaccacagctgataatgtattgagtctcatctgaaaccagcaagtctcagaggtgcacctaagaccctcagtgtagtacctgggtatcactgctggttattcggggcccaaggactcttcagttagcaagtgatgaaggctgcctagactgggtcctttccatcaagacagtggattcccttctggcccagggtgtatgtaaatatgtcatctggaactagaccatggaacagtggtctcatgactctgcccagtaccctatcttgctgtggctgagctggtatcctagatgcaagataaagtcctccccattcttccctctcctttccttaagcagacagcaggggtgtcttctggagctgtgagctgtgcagcctggggtttggtgagagatgatgctagcactcccttggctgccccagcaggtgtctccgtatgtcacttttcccctcagtccgctgtctctgggcctagttcagcaccaaaactcagatttgcagtccttatggcctagatggcctttcaagttaatttggagtcacactgtgctatagccctcagaggctatacgtttgcaggcactcaattttggactgctgagattggcaattctcttctggctagggctgttttaaatgctccctccatgagcaggcatcagttgagtttattctgggtttcctttcttctctaacatgatataagtgagttcaatacctcacaggtgctgtgttctcccttccccagcaaccagagatgttctcagcaccatgctgctgctgttataagtaggaaggggtagtgtcagagattcaaatctcttttttctatctcttcagtgcatcttttagcaatataaagttaaaaccaggtactgtgaatgcttacctgattttaggttcttatgaaggtgtgtttttctgtgtagatagttgttaacttggtgtctttggatggtggggaggacactggtggctctttcttttctcccatcttgttccacctctccatgctattattaaattgcagcctctctctcccttcagatatattaataattgcttcatgtatttatgttctccaactttgggtacatatacacttgtaattgttatatcttcttgatggattgacccctttatcattatattgtgacctttgtctctctaaaaaactttttttgagttaaggtctatttttttatataagtgcagctacctctgttctcttttggtttctgtttgcgtgaggtaacttttttcatcccttcactttcagtttatgtgtgtccttaaagtgaagttattctcttgtaggcagcatatggttgggttttcttttaatttttttagccatttagctgctctcttgtttaaagatttaatccatttacattcatcataattatcgataggtaaagacttactcctgtcattctgataattattttctggttgttctatatatccttcattcctcttctcttgctgtcttctcttacgattaggtgatttcctgtcatattgttttaaataggcttggctttgtggttaataagaggttccataaaacattttatagttacaatgggctattttaaaatgataatatcttaagtttgatcatatttgaaaaaaaaatttttttttgaatggtgaagatctttttttttaaattttattattactatactttaagttttagggtacatgtgcacaacgtgcaggtttgttacatatgtatacatgtgccatgttggtgtgctgcacccattaactcatcatttagcattaggtatatctcctaatgctatccctcccccctccccccaccccacaacagtccccagagtgtgatgttccccttcctgtgtccatgtgttctcattgttcaattcccacctatgagtgagaacatgtggtgtttggttttttgtccttgcgatagtttgctgagaatgatggttaattttttgaattttttactccacagccctgccccacacattgttatgttttggctatcacaatttacatatttttatattgtgtaggccttaagaaattattgtagctgttatgtttaatagtttttgtgagctttataatgaatatataagcgatttacacaccagcattacaatataagtattctgaatttaactatgtattcccatttaccagtgatttttatatgttcataagttttcatgttactagttagtcttcttttttttcaagttgaggatctcttgttagcatttcttgtaaaacagtcctggtggtaatgaacttttttatctttcgtttttctaggaagaaagtctttgtctctccttcatttgtgaagatcaactttactgagtatagtattcatggttcacagtattcagcactttgaacatactatcccattctccctggcttataaggtttctgctgaaaaatctgctgacagccttattgaaactcatatgtataaacatatatataaatatatatatatggatatccatatatataaatatatatatatggatatacatatatatatatgtatctttgtgtgtgtctttcagaatcctgtgtttgatttttgactatttcatttaatatgtcttggcatagtcttgtttggattgaatctaattgagctctctttatctggatatttatatatttctaagacttagacagtattttgcttttatttccttaaatagcttctactcctttgtctttctcttctctttcggaaactactataacttgagtattttctcttttaatgctgtcttataaatatcataagctttcttcatttatttatattatttttctcctctgactgcatattttcaaataacttaattgctctgcttgatcaattctgctgttgatgctttcaaattgcattttaatttgattcaatgtatttttcagctccagaatttctatttgacttttgtttagtcctgttgtggtcatttagttttttcctaatttcattgacttgcttctccatatcctttttaagtttgctgagcttccttaaaaataattattttgaattttttttcatctggcagttcacatatctacatttcttcaaagtcagccactgagagattattgtggttttttttggtagttgtgtgtatccttgcttttttgtgtttcttgccttattttgatatcctaggtccacagggatgatctggagcctgggattgtggttgctggccagatgacgaggacttcagtaggcagctttactctggggtgggcctggagctttagtctgtggggactcacatggcactggagcaggctcaaagtctcaggtcactggggccagctgggcactgcgactagtccagggcctggagccagtgggatggcttggtggtaggttgaacccagagtctgataccatcaggtcatcctaaaacctgaggctctaggatcttgctaggtgttggaacaggcttggaagctcagtcttcagggactggcctggagtctgggtccatgaaggtctgcacagtgctgggttttactggggtgggctcagtgattgggcctcagacgaagtctaatgttcacttccctcttttcttccacatgaagatttatctctccgtgatgtgatgcctgaggttggaggaggagtgatacaggtaatactgtcctgtctgccctcgtcaatgcagttttcttcttacttctgtgctacattcaggtgctgcaatctatcatctcggttgtttagctcttgcacaggtattttgttgtgtagatacttgtttaaattgatgtttctatgggggggtgaataggagaaagccctattctatcaccttgcttttaaattatatgcatttagatttaaactgtaaattttgttataaattataatatatattatatgcattcagattcgtcaatacttgaggtttcccaagaacagaagatgggatctcttctcacagttacaaaattaaaatgcctactcaggcagttttcgcaaaacaaagtagcagaatgtctcaaagaaaaacaaacttcatctctacttcaactcacatagaaagtgctgcttatttaaaatagatatattccacgttctacccagcaaaactttaaaaaatgtagaaatcagccttactcaaaacatctctctacataagaataagttggtgcctacaagtttgctgtagacagaacataacaaatttgctctgcttagtttctgtttagtttcttcttgtttagttttgaggctaggaagataagagtcctggcagcaagtaaaagcttaataaatattattttctattcctcctgctttctaaacttgttagatttgggagacttgggaaatgttcaagtagtgtcagtaaatcttcctctctctttctgctctgatcctccccacaacaccatcctcttaccacttcccaaaaacaaactccaggaaacacaacccccaaagtgtttagacattcctagattgccaataccacataagcccataattttccccattaagtggaattgaatataatttaaaaggtttatgtgctattttaagattcttattaggtaattttcttgtggtaaaaaggctttgcttgacttaagaatccactgaagcaagattatttatagataaccaaatccagcaattcacattgtaatttattaaaaactttttttctattaaagaatcaacacttacttagaaatataactttattttaactttatcaagactagcactgtgctttgttttccaggtcatcttttaaaaagaaatcattctttttttatcagttcactaatacttactcacctgtagcataagcaataattggtgagaatggaatacctatacagagccacagagcagagtacttggttagactcactaattccttcctacctaccagcttggtagtgggcatgattcaagagtttgttccagaaaaattaaaaatgactactttaaagagaccttcaagaaagctcctaactagacaacattaaatattaaatctgcggcaaccaatgtagtagtctatataaacttaattctgccatgttccttggctcattgtggtgactaagaacatgagctctggaaccagattgcctggtgtgaacccagactacactaattatcaaaatagaaccttcaatgagttctttaacttctctttgttttccttatgcaaagatctgataataacaatacttacaacatgttattgttatttggattaaactggataatgaatgtaaaggacatagaagactgcttggcttataataagcactcaataaatgctggttcattatttctacccattaattaccctcattctatctcacccttgggttaaacatcatttacatgattttctaatgactatttcccaagcatgttatcatgcaaaatagatcaaatgagctctatgtaatgatttaattaattaatcatttgggctttatttaaattaagtcccagacattttcatctaagatatattaatttttctggcctatttcctatactcttgtgaacaaagaatgcttgaacaaaacacatcctttatacttgtcccaaattatcctgactgcaggctttttgaaatggcatccctgtcaggcaactcagagagttttaaaaacaaacaaacaagcaaaaccccagccaggccagctgtattctacatgataattaagtggagcttgggtgagctgatactcagtaagggtcatttcttggctttagcgcttttgacatctttaaagtccatctaactttatggcagcttctatttaaactgaaatgcagttttcaaaactagggaatctaatcaaaatgagtgaaagcaggagagaaacaacaggttttcatgctttgtaggtgtgatcttttttctttccattttgtttttctttttggtagtgaatccaaaacatttatgatttgccaagagtatgtactttggaactggaaaaacaacacaatgtaacagaaataatgtttgaatccatggactatcttccatgatgacattttggaaagcaaaaagatggatttatttcaaattctcttcatttaaaaaaggtcagagggaaaattgtatccctttagttctctagactttgtcctttgactttcatcttattacatataacaactttcaatttaataaggcttgttgaaaagcatttttttcataaaggtttatcttgagggagacatggagaaagctaatttccatttctttgtttttaaaatgaaagatgttttagttcatatacctgattcaaccttcccactgcatatactatttggagaatatgttctttatttcaaaaccatcccccttgattcaaggtggttccaaatagtcctataggaaagggagataattgaatttatgtgtgggaagagtgttgagagaaaggagtacaaaaaaacaaaagagaatttttttgtattaaaagaacaaaaggtgggcagcagatgacaggcttccattctaaagtattaaaatagtattgtattttctcttcttccaaagcactgagtccttaatttctttaaaaatgaccctagagcaaggtcactgatgtcatggatcacatgtagcctactgcatctcagattgtccagtagctgtctttgcattatttagtcaaaggaaaacaaaatttcaggttcacactgctcctgcccatttgctgatttgtttttgatctaaaatttaatgctaaatcctcagatttcctgaaaggtgactatcaccactctctctgaacacagttcggtgtagaccagcccaaccagagaatgtctatgatgcccatattgattaatttattcttaggggatatcaagaaaccctttttttttcaggaaggcaaagtgtgattatgcagctctcatagataaagggattgagatccacagaaattaagtggtttatttaagagccctcctcttattagagataacgtcatgggttgtaagtcttttgacatggaaggtaaatttctataattctcttccgaataaatcattattaaaatgagaccttttcctctgttcttttacacaactcttttgctagaaagagttaccccaaaacatttttccagtattgtctacattatgtccttggtaattaatcccctttagtcctatgaagcttttcattgagcttgtattttttcctaatattatatatgttcacaggtatgtgtttgttttttcacccctccataatattttgaatacattaatgaaaaaatattctaatgctttttgtacttcccagggtatgcaacactacgttaatttacagttggttccagcatggacaaattttatttattggttgcctaattcatgatattgaaatgagcatgacaaaaggatcactgggctgtttaaggtttagcttatacctctatattttgggagaggtggaacatcacctaagacaggtcatttatgcaggtcagcctcaggtttcttgtagcacataggatgaccgggtgaaacaaattgcataatatatggaatgcttcagtaactgcacttaactttcttcactccttgtgcatattatttgactttggtcctcactgaattctcagagattaagttaaatcaactgaaagtgttatgtgttgggtagaatagggaaatcaaaaaaaacagacatgccctgggctgagggataagacaccaacatggaactccatgaatctaagttaccacaaatggaagtatgaattgaccatgattatatatgaacatcttacagtttcagaatggcagtctgcatgttgaaaaaaaaaaaaaaagaaaattacattcattcttcattctcctccttcacctcataagaaattatcctctttgagttaaatgctgctttcttgtaatgaagaacctacaggaaaactggataagaggagcacataaggccggatgtggtggcttatgcctgtaatcccagcactttggaaggctgaggcaggaggattgcctgagctcaggagttcaagaccagcctgggcaacatggtgaaaccccatctctaccaaacatgaaaaaattagccaggtgtagtggcacacacctgtaatcccagcttctcaggaggctgaggcaggagaattgcttggacccgggagtcggaggtttcagtgagctgagatcacaccacttccctccagcctgagtgacagagtgaaaccctgtctcaaaaaaccaaacaaacaaaacagagcacatatgctcttcagaaatcttctgaggagctgatcaccgtagttctacttagttatctaatttgcctcacaaagaacaaaataatgccgcttgattgtggagctgattgggaggatagatccattaatacttttcaggacatgttgaatgactgtctttttaagattgctcaacctgatttgggatgtcatacctcacataaaaacggtgctttattttcattgaggtattgctttgtgcagtcccaaaccctattcacaatgtgtttaatatgtcataagaaatagataaatcatccccagccagagagtcaatgtgaggttatagtaattttgccctgagtgctgaaatcctgacacttttagtgttgttaccctataatgttatttcagtgaataaataacagcacttttctctatctcctagaaagatcttctggcattttctagggcattaatcataaaatctgtgtttaataaaaggataaaaggaaaatataaagaaatgaattaggtattaaatagcactgaagggaactatgtgaattcggggtatattggaaggtgaacattttgaacttttgacaggttaaatcgaagaatcttaatagacacttctctattccttcaggataggaaatgttgaataaaggtgtttgatatatattcaattttgtgtatgtgtgtgatttttttcacagtcatttcccccaaattatgcatttaaaaataaacacaaaaatatgtcttccctgcagtaagttaaagtaaaactctgatgacttggaaatagccattggaaggtagcaaattcaatttaattcacgtttaataaaagaaaattattcaattatctctgttttcacagctcaaatttctatatacatgaggtaaaggcagattcctaacaatatgggtgagacaaaataattatgagagtaaatattataattatgtaaataacctttggaattttgggactttaactttataacacttacataaaatgtaaaggtcacaaaggataggtttttctgaaagtagttcaagttgaaacaaaaaatgcaatagcataaaatgcaccaaataagctttcataagatttatgtcttgtttctgtttaaccatttactacaagctccaaggtaacgaggggtaaaactacttaactatcaatattctcattcatactcatttaatcctcattattaagtatggatggtactaactgcttcactctttttgaggagttgtaagcatcaacaaagtgatggatgcaatagtaatttgtgaaatgataaagtcccgtacgaaggtgagatagtatccatcacctctgccctccttcagctctgcctctcaatacagcagttcttaccaacacatttcaagggctcttgaaaattacaagtcaggaaggacatcataacagcattaaaatcctatttttcctctctttctcagggactaagggattcattcaggactaataaagtcccttgccagatgcctaattgcacatactttcttgagctacttctttcagtaaattgtttagctaaaatgagttttcaattaagtggaatatttcttttgggaaattccttgagaatatcacaatacattgtccatagtaggtccttaatacatatctctggcttgatggaatgaacttgtgtgttaatagcaagtgatctgagtgtgatcccagcgtgtgagcacatgctgactgataaagctttgtgtagattgcacttaataacaatggactgtccactgatgactcatgccatcgatgggcatgccagttcacatctaggatacacatttaaactctttctagtttgatcatacccccagggaagacttgagtcttctgtatcctgttaaacattaataaatcccaaaaataaatcaactcaaattaattgcatgtctgttatgtacaaaacattgcctcactacacacacagaagtgtatgaattattgtcctgtcggtacaatgaaatgcataaagtgaatctctacatgaacataaatacaaattaatgcatataaaatataagaatggaaacgtgctaagccatcataaaataaaggaggaattttaaaacagaaagaagaaaccctaatttctagaaataaatgggatcataaaatcctgtaaataaaagcataacttgatgctgtggctgttggtggcagatctagctctttatacctgggaatttgaagcttcaatatccatctaatagatgagacatgaaccacaatcctaccaggatgaacaaacacacctgcatacagccaaactgatggtttcctgctcagtccaccagcccaagaaaagcacaagaaagttggtctgtggcttcagattctgggtgtcaattttaacccatgagtagatttgttaactatcacccaaatcaggaaatagaagagtctcattaacctcacctccaaaaagaaaatttcttgtgctacctatttgtagccactttcccctcgtttacctctaacccaggtgaccactgttcataaccccagaatgtcatatagatggaataactctgtatataaccttctgagactggcttctttcactttgagattcattctgcttaagtgtattgataattctttcctttatatgttgagtcattcactgtgtggatgtgtgccaacttgcttatctgtcagtttattgaagggcattgggttattttcaacttttggctgattatgagtaatgctttgataaacattggtatacagttctctagactaaatgcctattagtgagattgtttggtcatatggtaagcgtatgttaactgtattaggaattaccaaactcttttccaaagtcactgtatcattttgcttctacatcagcaaggtatgagagtttcaattcctctgcactgtcaccaggtcatggtctttgcagtttttgttttttgttttttgttttttgaaatggagtctgactctgtcacccaggctggagtgcagtggcgccatctcagctcactgcaacctccgcctcctgggttcaagcaattctcctgcctcagtcgcctgagtagctgggactacaggtgtacactgccatgcctggctaattttttgtattttagcagagacggggtttcaacgtgttgcccaggctgctctcgaactcctgagctcaggcaatccgccctcctcggcctcccaaagtgctaggattgtgggcgtgagccacggcgcccagcctctttgcagtattttaaaaaataattgttttagtcgtttaaatagatatgtttctcaccataatttttatttttattttcctgaagtatatggataagtctacttttcatgtacttatttgtcttctgtatattctcactggtgaaatgtccattcaaatatttcacccattttttaatagacttttgctttctacattttgagtttttagaagtctttatatattttggaaaatagtctttattaaatgtgtgacttgaaaatcttcactcccatttctgtaatttgtctttttattgtcatcagtgtctttttcagagcaatttttaaaagttaataaaaattcagtttataatttttttccttcattgattattcttttggtgtcacatataagagctctttgtctaataccaggtggcaaatattttttatttactcccaaagattttatagttttaaattttatatttaggtctactttgaggtaaatttttgtataagtcatgaagtttaggtcaaggtttttggtgtgtgtgtgtgtgtgtgtgtgtgtgtgtgtgtgtgtgtgtttatttttttttttggttttggaatctggatttacaattttttaaaacattatttgttgaaataactatttttaatttattaaattctttatgtactttttttcaaaaatcaattggccatatttgtgtgagtctatttctggactctatatggttacattgattcctttttctatccctttccaatactttatagttttgattactatagcttcataataaccttaaaaaccagctggcataattatcccagtttatttttaaaaaatattttccccactattctaggtcctttacctttgaatataaatattagcatcactttgtctaggtctgcacaatattgtgtagaggatatttattgaagtgttaaatctgtaagtgaattttgggagaactgatatctgtactgttaaatcttgcaatccatggacctgttatatttctccacttatttaactacctttgaattcctttgtattttatggtattcagcatacatagtctgtacatattatatttgtatctaagtatgtcaatttatataactattgtaaatagtattgctttttaaaattttgttttgctattgttcatgatagtatattaaaaagtaattgattttttgtgtgttgatttaatgtactatgatctttctaaactacttctaagtggtttcttccttttttatagatttcttggaaattttctgtataaataatgatgtcatctccaaatagtggcaattttatttatttcattatatgctgttttccttttatttctttccttcctttattacattggctatgactttcactatgatgttaagtagtactgtaataagaatggacatcctttctatgttcttgatcttaggtagaaagtatattgctttataacactgagtagggtattgaccagggggttttggtagagactattagtttgaggaagtcttcatctatttttaatttgctagaattttttttagaattggctactgaattttgttaaatgtattttatactttgattaatatggccatgtggtttttattctttagtttgttaaagttgtgaactacatcttttaacttaaaaaaaagacaaggatttgaatcagacttttattcctatgataaataatatttggtcatggtgttttttataaatatatttttatatttgatttgctaatatttttgagaacctttgtgtctaacttcacaagggatattggtctgtagtttccttttcttttattgtatttgcctagttttggaattggggtgattttggctttataaaatgagttgggaatcatttatttatcttctatattccagaagagattgtttatggttttttctttgttaaatatttgtataaatgtatctgtacaaacagattttttttagctattttaactgcaggactattccatttctctgattcatcttgaatgaggtttggtagcttactgtttttgaataacttgtcacttttatctaagttactgaacatatatgtgttaagtgtaatgttcctttatcagtttttacaacctataaaattttatcataaatatttgaattaatcaggcctctagatctattattttacagaaaattcaggaaagagatgaatatattaatagaccccacagtgatacattcaggaaaagcttgattgtggaaaactctatggcacaaaatcctgatttcatcaataaacaaattacaagaaaaaagaaaaacagggaaagaaaaacaactgccaaaaaaaattcaagagacatgttaaactatatataggggccgggcgcggtggctcacgcctgtaatcccagcactttgggaggccgaggcgggcggatcacgaggtcaggagatcgagaccatcccggctaaaaaaacggtgaaaccccgtctctactaaaaatacaaaaaattagccgggcgtagtggcgggcgcctgtagtcccagctacttgggaggctgaggcaggagaatggcgtgaacccgggaggcggagcttgcagtgagccgagatcccgccactgcactccagcctgggcgacagagcgagactccgtctcaaaaaaaaaaaaaaaaaaaaaaagaaaatgtctattaaattatttaggtaataatactaccatgaaattattttaaagattgaaagattgtagcttgttatacattaaaataattaatatagttgtttttaattatgaacaaaaaatctataaacccaaggtgatattaatgaaaattacatttgactttttgtcatgaaatttgaaaacaaaactttttagagagatgtactcaaaaagttatagatgaaatatcataatggctcacattggttgcaaaataattcagtgcctaagaatggaaataaaacaaactatagttgaaacaagattgtctattacttcataattgttgaaactaagtaatgttgctattttctctacattttccataataaattttccattacaatattccatagccgggcatggtggtgcattcctctacatagccccaactactcagaaggctgtggctgaaggatcgcatgaggccaggagctcaaggctgctgtagcctgtgatcacaccactgcactccagcctggtgacagagcaagaccctggctctaaataaataaataaatatgtaaataatgcataataaatatttttcataatacatttgtgaaaacaaatatttaagaagtcataaagaaaatgatgacaaatcatcataaaatggaatgacaattaagatatttgtgatgacatttatcgaatgcagttaaaccagtgcttaaaggaaaaatgcatacattgaaaaagaagattaacaataaatgggctaagtattattctcaatatattactaaaagagcagcagcagttgactacaaccaccaccaagcagttcaaagtaaataatggagtagaaattgataaaatgcaaaacaaatctacaaaaccaaaagctatttcttaaaaagtactatgaggccgggtgcagtgactcatgcctgtaatcccagcactgtgggagactgaggtgggtggatcacgaagtcaggagatcaagaccatcctggctaacatggcaaaacccagtctttactaaaaatacaaaaattagctgggcatggtggtgggcgcctgtaatcccagctacttgggaggctgaagcaggagaatcacttgaacctgggaggcggaggttgcagtgagctgagatggcaccactgcactccagtctgggtgacagagcaagactctgtctcaaaaaaaaaataaaaaataaattaaaaaaaagtactatgaaaagctctagtcagatatatttagaaaaaaaagaggagaaagacacaaataaataatgttacaaataacataggttttgaaaaggcattttaagtgaagataatattacgaagtattttatgctaaaacatctgaaagcattctagaaaaatataaattactacaagtacctcattaacagatagaaaatctagggagacctatacattttttccagggccagactttattacacttcagttataccgaactttcaaaaacaaataacaaatcatatataaaactattgcagaaaactttaaatacagatacattgttctaacttaatttgaaagaatagaaatagcatacaaatataataataaaagtaaaaattgtaggccaatctaacttatgaaaaatgataaaatcatgctgaatcaagtactagaaaaattaagcaataaatgtttgaaattcattataaatatgttgagtttaaatcagaaatgcaataatttttttaacattacaaaaactatgtcataaagtaacaaaacattcatggtagcaatacaagatctaagatgcttgaaatggatctatacgacttttataggaaaaacaaagaattcaagcaattgaaatatatttttgttattgactgaaaaatacaatataataaaaatgttctcctatatccattaatcaaaattatgatcttttaatggaactttagaagcagttataaaattaatatgaaagagtataaagaataaaaaatacaaattatagaaaatataggtatagaaatagaagtatagaaaaaaaaaacaagtttgtagaaggtatcttttctgatatcaagactcattttaggccaggtgtagttgctcacgcctgtaatgccagcactttgtgaggctgaggagggcggatcatttgaggtcaggagttcgagaccagcctggcgaacacggtgaaaccccatctctactaaaactacaaaagttagttgggcatgctggtgcacacctgtaatcccaggtactcaggaggctgaggcaggagaatcactgaatcagggaggtggaggttgcagtgagcccagatcatgccactgtgctccagcatgggcaacagagagagtctgtctcaaaatcgtgaaaaaggccatgttgcccaaagtaatttatagattcaatgctattcccattaagctaccattgactttcttcacagaattagaaaaaactactttaaatttcatatagaaccaaaaaacagctcatatagccaagacaatcctaagcaaaaagaacaaagctggaggcatcatgctttctgacttcaaactatactacaaagctacagtaaccaaaacagcatagtactggtaccaaaacagatagatagacaagtggaacagaatagaggcctcagaaataatgccacacatctacaattatctgatctttgacaaacctgacaaaaacaagcaatggggaaagtattccctatttaataaatggtgttgggaaaactggctagccatatgcagaaaactgaaactggatggcttccttatactttatacagaaatgaactcaagatggattaaagacttaaatgtatgacctaaaaccatcaaaaccctagaagaaaacctaggcaattccattcaggacataggcatgggcaaagacttcatgactaaaacaccaaaagcaatggcaacaaaagccaaaatcgacaaatgggatctgattaaactaaagagcttctgcacagcaaaagaaactatcatcagagtgaataggcaacctacagaatgggagaacatttttgcaatctatccatctgacaaagggctaatatccagaatctacaaggaactttaacaaatttacaagaaaaaaataactccatcaaaaagtgggcaaaggatacgaatggacacttcccaaaagaagacatttacatggccaacaaacatatgaaaaaaaactcatcctcactggtcattagagaaatgcaaatcaaaaccacaatgagatactatctcatgccagttagaatggcaatcattaaaaagtcaagaaacaacagatgctgaagaggatatggaaaaataggaacgcttttacactgttggtgggagtgtaaattagtgcaaccattgtggaagacagtgtggtgattcttcaaggatctagaaccagaaataccatttgacccagcaatgtcattactgggtatatacccaaaggattataaatcattctactataaagacacatgcacatgtatgtttattgcagcactattcacaatagcaaagacttgggaccaacccaaatgcccatcaatgatagactggataaagtaattgtggcacatatatgccatggaatactatacagccataaaaaaggatgagttcatgtcctttgcagggacatggatgaagatagaaagcttcaatctcaggaaactaacacaggaacagaaaaccaaacaccatatgctttcactcataagtgagagttgaacaatgagaacatttggaaacagggaggggaacatcacacacaggggcctgtcggggggtggggactaggggagggatagcatcaggagaaacacctaatgtagatgacgggttgatgggtgcagcaaaccaccatgtatacctatgtaacaaacctgcatgttctacacatgtatcccagaactttaagtataattaataaaataattaaaacaaagactcattttaaattagaataagtaaaatacactgacaccaaaaaaattttaataagaaataatttccgaatcatttttaaaagatttatgtgtttgactacatcacaattcaaaactagattaccttaaatttagatatcattaaaactttcattaaaacaaaaagtaccttaagcagatgaaaagaaaattcatgtaatcacataaagaaaggatatactggtgacgcatataatgaaaagtgggttaccactgagactatataaagaacacctacaaatgagtgaggaaaagccagcacaattggaaaatagaaaaagatgcaaataggaaattaaaaaaaataaaagtcaaatatctaatgagcacaggaagagatacttcaccttactaatgatgaagaaaagaggaagtaaaagagaaattagacattagctagcatttcacactccttagattggaaaataaacaaataaatgtgtgtgtgtgtgtgtgtgtgtgtgtgtgtgtgtgtgacaatcaatgtcagctatgatataaggaaactggaattttaatcctgctgatataatcagtgatatgctggtagatgtttaaaaccttcctttccaagaaaataaaaaaaagtcctgacttgtaacatttactgattttcgggggcaactattctcattgtggctgttttcaagcccccaatgggatatgatgctactgaacgcagaatagcgatgtgcacagctagaattgtaagactaaaacctagtgttctaatttttcagtatatactactaaacaactctagtttatggaaacaggggatattaattttaaaagaaaaaagctgaaaataatctaaataaacaaatataattctgattgtctacaaagaaacagatgaataaattacattgcatttccgtaatgaaatactgcatagcaattgaaatgaataagctagatttacatatagtgatggagataaatctcaacaatataatttggagtgaacaaataaaactgcaatgtaacagcatgtatgtacatttaaaatcacaacataatatcatttatgaatatacacacatatgtagtaaaatatgaaaacatcaatgagaaaaatgcaccaatatctaccccgtggcaacctctttagtgggaaggtgagaaacagtaatctggcatggggctttaattgttttggcaataatttatttctttacaaaaataaaggtctgcagtgaatgtagcaaaactcattttagatcaggatagaagataggtggttgctggctgtactgttctcttacttttattttatgtttgaaatatgatatttgggggaaaattcttatctctggtgggagtttcttatagcttaccgtgatgagggtaggatgctttgtagacatgaatagcttacataactatatggtcatgctcagtattaaatgacagtaatatgtgtggagctccttgaagggaccgtcataacctgtagaagccaaggtgggcttcacctcccatgactctgcacctagttgttggaactagaacagttcctatgaaattcagtggctctcaatctggagccacaggactaaggcatcactctgctcataagtgattatagtgtatatgtcaagtgaggtgtctcctttcgtcatacataaaagcaggggatgcttaaaggagttcccctaagattaccatggggatgtcaaccttgaaccaacacagcgaaggtgaaagaagcaagataagacacaattgcccagttaaccactgaattcatttcctttctttatgtggagtagcttcactcaaccgatttgatctgtaacccaggtatctgtcagtgatttcaagggactgcttgtctatggaaaatgaaataaaaaatggccatttaaagccaaaagcctttggtatgtggataaccatgcagaaatgagaaatttcatggaatcccagaatgttagtgttaggattcagagatcagctaattcactcttttcttctttctggtaaggaaattgaggcttcagggtgattttgtgactttccagacatctgtagtggaagaactaggtctaggcccaaatcatttaattactagctgagcgacctgcacacaactgcaagaaattgttccatcacaaaacttcaggatgattggggttctctctttttctctcttttattccaagcttaaaaaaaaaaatctgctgaacgtcccactggagctgaaattgtagaagacaactagctctttaattatgatgtgcagtgagctgcttttacttttcacttgtctctgaagctgaattgcccagtgcctctgaatactccctcacatgtccctgtgatttgtatcagctcacaaaattaaaaaaacgcagacttgcagctctaatttgccagaatccttaagatctcttttatcatgccctgctgcctggatggaaagcagcattctctttagcggcaatctgctgtaatcattttttattcaggtggcaggcagggttcaagcaaaacatgaaagacagtgattggagcacagtgtcttcagatagtttaaaccgcatcattcaggaaatttttatccttttttatttagctacatttatacaggcttcttttatagctcaggagaccaaaccactgcacagggatataaataaagtgcatcagaaaagagcatggcatttgtagtctaaggttactcctttctagatgtatataaccttgggtttctaaatctgagtccttgtttcttcatgtacaaaatggggaagaaaagatatatatactcatcaccagattattgtgacgggaaaatgagccttaagaattgtgtatgaaagggccttatatattttaaagtgttacacacatgttgggaccacatacccattttgtatacgaattttttaaacttgccaacttgtctacacaagacacattaacattttcccagtcaatatttaactatccatgtcatcactaagagttatttaaaaacaaaaataaaacaattcagactctggttctattttttcttaataatactctatgccgtgccattctgaaacatagatggtgaggacaaattgtgtaataaacagcggccttatttactatagagaagagaaagaaattgtttctctgccgctaaatgacaatttattttaccttatgagaaaaaaaaatcaatgagaaaaaaaggaggggaagtgacagctactgggatcacaggggaataacttctaactggcagttggttttggaaacttcattggtttagagaaaggctccagcctcttgagcatgtagttcttttccatggggctgggagaccagggcaagctctgtgttttttcacttagtagactgtctattgctcttgcttggtttcatttgcaaatattggggtgggacgtaaagaataagataccatcactgggactgtcacctacagtggcccacgcaggcaggccccaacacagctgctgtgtctgacgtccaggggagtactggtgtatttttatgccattggaatacttctgtgggctccccatcaagggaaaaattctcttgatggaaagaaaccccaaaggaagattctctcctcatccttaaagaagcaggaccacaaatcagagatagttgttcaaactactgggtcaatatttctctgccattgggacttaagagacaaccataagtccaatgtgaccaatttcctatattaagtaaatatcttactattgtcattttcccccaatacctaaaatccccatgggttcactaagaaaaatgtttgtaagtgaaacctttgtgcctgatagactgctaatgctaagtatagagcgatatcattgttcctgtataatataggatttttctcttaaaagtcttcttgaggatacatgcacattttaatgcctgagggcattagaccttgtagatatatcatttgggtcacaaaggttgctctgtctgatatggccatagccgtgccctccctttctccactggggtaaaggaagggagaggagtgaaagagaatattcatcactgaactgccatccaatgtggacactggagagggagcattgagtagctggagaatgcgaaggctctgagacactggcagagcccccaaggtggactgaaaggcaggttacagaagagataatctgaggtttgtttgttttagaatcctgtcctgagctgaacgacatagcaggctataaattggaagtaaatttaagccacatcaaagtcccagccacctaggccttgatgggtctgagggccgtgctgaggtgactacagtcttgttagtcaaggggtgaaccctggagtagcagtattatcatcatgtgaggtcttgttagaaatacagtgtcttggaccagacctattgggccacagacctatggaatcacaacctgtattttccatcagttccccaggtgattgcctagctctaagttttgggagtagatgggctagataatttgataacagggaaaacggcttatagagttaattgtaattcttctcaagccacactgagactaaatctaactgggcactttttaacatctctgtttaacaagctcttagtgaggaaaaagggattcttcattgagtccagtggacaaagcaaaacaaggatgaagcctgtatgattttacccgaatgcatctctgatctcccctatggccccaagacaggacgctttaatggtctggacatatttctctttggtataggtaggacctgggtttaaggtgacagtaaaaatgcctacgggatggctatttgggtcttcagggatttccaacaagcttcctgtttgggggatgttggaagtgcaggcttccatctcaggtcatcttcaaagttatattaatcacagaagacccacttcactcctgtaattccccttcccattcccatgcatcatagagtaccaatctcagacctgacttctctggtgttttcacctcaaaaatgggggtttacttgccattaagctaagaagatacccttatctatttattaccatttattatgaaataccaagaagaaaaaacacacatctaattataatggctgaagtgctttatcttgcttcaggagacaccatatagaaaacataagaaatttgaaacatacgttatggtaggtcttgcctaccagtagtagatcatttgaattttgcgtgcttaaaaaagtatacgttaaacccaaacatatttagaggaatgtgtattcctcttttttcaaaggtgaaaaaactccaacaatattttatcaagaattccccatatacactacacatttgctaatgtaaagcccactgttggtgagctggtgaggaacgattaagcgttgttcttcaggattccaaaagaaacataatgctgtagcatttacacaagtaaatgtgatgcttgtattagatggaacaataggacaatttcatatggctcaaccttatacagtcagtattgttagatcgggattttcctgtggattgattagttagaggtcctctaataaatatttatacaacagggggagtgaactacgtgctgatactcagactaatgtataatcctccctctatgaaatacaggaagatcaaccatagtgtttacaattcagttgccaatcactatatgaacccctgttcatctcattactcactatccaaagcaacaaaatggaatgcattaggatagtcagagttagctcactcagtagtggcaagccatggtacttaactgcttttctatccccctgactatttaaatagctttaaagttaaagaaaataccaattaacattttgtggtttcatggaacagctagcatgctactcaacaaatctttgttgtcttttgttgaatactcataaacttatgtgagcaggttaaatgaggaagctttttatgaaggagaacatccctatagcttggaggggcattcctaatcaggttctaaaataataattatttgttattcactacagtcttaaccacatggttgggaaaacatgttcctcataggtatagtggtgagtatctctgcctgtcacatggttgagaaaacaaatgcttttacccttatccaggtgcttgctagaataaccccttgaggacaggcaatgtattttctatctctttacatatttcatggtaaagagcctggcaaagtgaagaccacacttaccaggattagaatagtgaataagatctttagaactggaacttagagagccctcaatctgtgaaactcacagttttgaaagcatttttaaatctcagattaatgcgttggcagatcaacggttggaaaaattcaagaccactgtgtatatatcaggtcagtggtgatataaccataatcctctttttgtgaacctcagtggggaatctgagagacagacttctactctgactccacagctggcttgaagccccagaatgaatatacaaatggacagtgtctaaatgtcacatggaaagagattgctgacctacaacctccgcagcaaccagccacgaagccaaaccatcacctctgtagcagtggacccagaaaggtcaagactttgttaataactgctaagttctttaaatgtgcccttgctttcaactcaagaccaactagagcaaaccaaatatgctccccaaatcaatcacaaaagatgccctcttcttaggcatccagctggctccagcttccctaggccatcagcctctcatcaaggcacacctgaagctttcccactcccctgcctggacacacctgaagggcacacctgaagctttcctctgttttattataaagctttcccactcccctgcccacctttgagtatctgccaatggcagataatgattcctattccctgatccccaaacatgtctagatttgtctgaatattttatgatcatacttcagatttcagcttagatatttttaccctggggatcatccttccttgatccactagttgcttcccctgtcttatgctacagcagcttttacatttcttatcagaacacttacaattcagaattagaattgctcatttgcctatgtaactggaatataactacagattcaggtggcccagtctctggacagtattactttgtcaaaaataattgttgggagcaattcaattatcctcatttgtaaaaataccagcatactcttgtaaagtgggcacattattaaagaaagagaaaacacttaaaattctattaatattaaatgtttaaatgttaaatttaaaatatttaaatgtttaaaatatttctctcacattcaatatctttcttatgcctggaagatgcttaaaacaacaggaacagcaaaagtgaaatcaagttagtcttcttgctttgttttgttcttgtttttcttcttgttttgtttcccaaaacatttccccacatctagcccacatggggctgaccctcttgctatggcaacctcagccgtttttttattacttttggataatcttaatttatttccacacccccactctgtcaccacaatcaagtacctggtctctaaactcctgattggaaagaattattttttcacatcaatgaagagaataatgaaaaaccagccacttccactgtcaatacacaagtgatacaggcctttcactgacttgaatttccagcagctgccttctaggggtcgctctcaccacttccctctatatccaccatgtggcagctgtagctggggacagctcccaagaataggagaagtgtccattttgttttcacattgttactgggtagagctggtgtgtactcattaagcactgtgtatattccctaatcatacaggaagaggtactattattatcatcattgttgtcatcatcatttttattaaatctggcatatgtgaaataattgtagttacaaaaaatctattttaagtttggttctgggattgttttggctttatcagggggcaacattttatttatatgtttccactggttctgctcagccttgcaaataatctagttccctaccaatctaggccaaataaaactgaacgctaagcaacaggtaagcatgaatatattgactggcccctgatttaaagtaaaatgtaaggacgatcccagagtacttacaacagatggaaacattatgattataaatgaactttttaacagaaaactttaaaatcttagttcttaagtcatttatttctctttactttatgtacctcacttccaagtaaaatagagccaagagatgttgagggtgatttgcctaaaacctgataaatcacttaagcatgactgtggtccttgaactactatagatcaactctaatcacataatatggtttaactctgtaaaatgtgagaagaaggtcacctcaggagtgctctcagctcagaagaaaacagagaggccactattcacaggctttaaaatcagactcacggtgacatttacaagaagtctattttccccaatgtgtatgtttatttatttatgcatatatttaggtgtctattctttgctaggtatcattaaatgctgagaatatagtatttaccaagacctaatctttgttttcaatgtgcttagggcacagaaagatgaggaaataacaaaaagcaaaaatgtgtgaatattcacagcctttcttccccttccctctcacctctatttcccagctgaaggaagattctcacttgcttatcatctcctcaaccactagtatagcaaaaagtgacaagcgttcaaagaatgtagagaagctaagtttaccatcataataaggtctatgtcatagatgaggaaagaaaaaaggaaagccatgtgcactaggtgtgggacagagttttgggaaacagacaaagagcagcaagaagactcactcgatttcattttgttgttcttgttgttttaagaatcttccacgcaaaaagaaagatattgagtgtgagaaaaatattttaaacatttagatatgttacgtttaacattaaatatttaatattaataatttgtaaaggtttatattttatttctttaagaatgcacccacgttacaagagtactctggtatttttacaaattaacaaaattgaattgctccaaacaattattatttacaaagtaatactgtccagagactgggccacatggacccccagttatattccagttacatagacaaatgagcaattctaatcctgaattgtaagtgttctgataagggaggtaaaagctactgtagcataagacagggaaagcaactggtgtatcaaagaaggatgattcttaggggaaaaatatctaagctgagatatgaagtacaatcatgaaatattcagtcaaaactagacatggttggggatcaggaaatagagtcagagggggcagtatcattataagaaactaagtattattcataatggctggaatagagtgtgtgttggagaataaagggtaaaataacatcggggaaggcattttcattatataacgttttggtgagatctggaatataacctcgggtttccattaacaaattctctttccatctgtgtaagatgcacttcttcaatgaggttgcagtttaactgactttagtgattagccctctatgccaaccaactttcatctattgggcctcagagtagattgtacatggagtaggttcagtaaataaacaaattacttagttgattagacatttactctgtatcagaccctacgcacatatcaccttcacttcttactataaccctaaaaaggaaggtattatttgtcctacttaaggaatgaataactcaaagataagagagtccattaattttcacatcgaagtggggacacaagattcatggttttttcttccactatgctagactgcttttaactgctataaaaatgtaaaatctccatttagccatgggattcagtaaaaatgcatgtccactttctcaagtctttctcacactcacccagttttttgtgtcttgctactttacttgtttgttaactcctaatattacttagtaagagtaaagatatcttagaatttaggaagtctttgccactccttgggaatattactttaatcctcctaacattcaggacctcatgtgtaaaatagggattacattcgtacctatctcatgggattgcaattagaataatatgatattacttaggaaaatgtaggcataaggactaaaataaggctgacacccagcaatgaatgttaaattcccttcatctttaatgggaactttctcaaactcagtcttctttcatcttcttttataagaactttgcccgcattatcacattcatactatctgagatggacctgaattcttaagttaacaaaatgccaatatactattaccctgtgtgttatatgtacttgactacacaccattttaaaaacagtgatttttcttctccctcactccctgaatgagaactaacttctttttacccttaacgctctgtggtggaggcaatcaaaagatttaaaccctctagaaataacttctatgtgacatcgcttagaattcatgacacaggaggtggctccaattccaccagaggttccaatcagcccttagttcccattatctcctcctttcactcagttaattatcaaaggttgagtaaagagagaaaatgaacataaatggaacattgttcctttaagaaacttctccctgccattgcctttcaggttgatgattttgatcttaagaatgcactgtctcagaaggaggcagcacgcagagacaaatgtcacagtaaataatatgtgaatagtccctcggtacagcaggcaccaagctcagaccccaggcatttctctttcacgatgctccagaggaactcttcagtctaacatagccatattgcaagatgaattggggaatctttcttttcctgctgattgagctctttcagtccgtgacaagaccaagcagaagatgccctgtgggactgagggttggcacagaataaagatataaccagccaacatgactcaggaacacaatatcaggtatttttgtcctgagaacaactgcccaggagaaacaaacatatctataaacacacccaagtggggagtcccacagccagaaagtagaattaaaagttaagtttgtgagaagaacatggtttgaggatttaggttagcttccctggaagcagacaggggattctgaggctgagaagaggattccaatgcatgtgatttattaagggaagactctcaggagaggagggacgcagggtatgacaggaagagtagctgagcaaggatgttatctctgctggagattaacctcagcctgatcacacacagagatctgagcatgaatcaaaccacagagttcatcccaccttgaggcaaggggcaagacattgtgtaacctggcaggccactccaaaggtggtaatgtagaacctccaagtcagacagctcccttacagaagaaagtagtctccaaagaagttggcagcctggagccatctaacagccatcactcatggcaactgggagatggctacacttgctggataaagggaatctgggcagagagcaaagagcatctactacacttggaataactttattctttcatatgtgtgtacctatggatggagaggatctctctcttcctctctctctctctctctctctctctaatctatcattttgcaatttacattagtctatctacctatgatctatttatttcaggctttccttaaatgttgctatgttgctaaacttgtagattagttccatttgattctatctacccaaagctatctttctaaatgacattttaaaaagcaaattgtttaaaaagtagcatagttatatgacgaggttttacaatatgtttttggtcctctgttatgctagaccaaaaacttttttaaaaaagaatgaatattgcatgtcagctgatagaacagaattgcatctcagctgtgagaagaacattttgtctttttaggctgtcataattaatagcttcagtgtttgatttgcgaggtttttcaagctacagaagattgtttctatatacacgataaagctattaaacactgaaatatattttcaaaagctgcatacaaaaatcagctttaaaactttaatattcgccacacatgggcctggaagtaaggaaggcatctgctattctcctctcctcatggctattttcaaattatccttctcttggctttctaaaagagctaggtgttcatttcaggtggtatcagtagtctattgccgaagtaacgctgcatagcaagccatccccaaagccaaaggcttaacacaatgagcacgtatttagttctcaggcctgcagtttagcaatttaagctgatgtattagttatatattgctgcctaacaaattatcctaaaactcagcagcttaacacaatacccatttatcattctcagtttgcatgagttaggaattaggtgcagcttaggtgagtcctctggctctgggtgtctcacgggttacaatcaaggtattggctgagacaagggtcatctcaacgctcgactggaggttgatccacattcaagatccctgttgtggatgtggctggcttcaggtccttgctggcagtttgctggaaacatcagttccttactatgtgggcttctacaaaggactattcatagcacagcagttggctttcccccagaacaagaatcataggagagggagaaaagaatgaacaagatagaaatcacagtcttttataacttcttggaagtgacattccatcacatttgctgtattctattcatttaaaaacaagtccctaggtccagcccacatccaaataaatggggttacttaagtacatgtataccagaaccactgggagccatgcaagctgctgcctaccacagctgggttcagctggttcgtttcctcaggttagattggtcttgtcatatatctgggagtcagctggcctttggctgatctagggtggctttggctgtggtggtttggctctgagccttgtttgttttatcctcttaaaaaacagctggggcttgttttcatgatgttctcatggagtcatgagaaaagaagcagaaacacccaaagctgcttgaagattaggctcagaacaagtatgacatcaccttctctgcactctgctggccaaagcaattcctgaaaccaacacagattcaaggtgtggggaaataggttctctccttgacaggaaatgttgcagggtcacattcaaaaggacctgaatacaggggctgggggcgctgaggaacggaggccactaatacaatcaaaccagttgattttatcagcagattgtttctcttactttgtaccctcaaagcattcacccagctagtagctattcccctcataacttgaagcttctttttccactcactgtgactctacacaatgctatttctgttggattcttggggctgttgatgtccacaaacatcagtgttttccattggagtaccattgttatttgagcagagaaaattcttcatttatatgaaactattgcttgggtggcaaggaatttgacttccctgactcctgccctctaaatgccaataacacttcccagtttgaaaatgctccaacagggagggaggcttcaaataagcaagtggagagggctagaatgatccatgtgacatcagcatcaatttatgtttatcttgatatagatacatacagggacatacagaaatgttcagctgagagagcctagaagcggcagcacaccaggagcaaaaagcaaaatgagcgcccagatctttgtttctaacaccattctctgagaaaaggaaccagagttctttggtgaaatcactcacctaggactggcagagaaaatatacaagatgaatctggagcatactttagtaccagaaagtaaatgttaggaaacaaacaaaagccccacaatgatgggggcatgtcagaagatcacaggtgcaaactgagagagctcccaaggctgacgcaatttgtgtaacaaaataagtaaggtagaatcagattatagcccaaagtataaaatacatatccatactgatataaatacatgattaaataaatacacaaatggagaaaaatagacaacccccccaagtacaagaattccagataatttaggtaactactctgcactcaagcatgactccctactccttcggtgtgggctgaagatcatgcttaatcccaaagagtagagtatggaaaggaaaataaaagagtaaatttgcagtggagcaacttgacagaaactaccttagtcaggtaaccaaggtcaacatcaacagtgataagccattgttcatagcattttgccttgatatgtgatgagaatgaaattttgcctctgtaaagtgggtctgtctccacaaaacccattaactccattctaatcttgagaaaaaaacaaatcagacaaatctcagttgagggatgttctacaaaatacctaaacgagtagtccccaaaactgtcaaggtcagcaaaaaaaccaggaaagtctgaaaaggcaacacagctaagaggagcctaagagacatgacaactaaatgaatgtgggatcctgatgggatcctggagcagaagacagatgttagatcaaaactaagcaaatatcaataaaatatagactttagttagtaataatctatcaatattggttcattaattgtagcatatattccacgcaaatgtaaactattaataatagggaaaattgagtattagatatatggaaactatgtactatcttaacttttctgaaaatctaacactattataaaattaagtttattttaaaaaatcaacacattttcaaccccacccacccacctcaggtgagtggtagcactcttgtttgaaagatacttgtgtagaaattcttctgatgcctgtcagtcctatgacctcctttctgtccttcactcttgctcaaccactcactcctgcagtcacaaccagacgctatcatcaccaatagtacaaatccttcattgtctcatttcaaacatctctctcccttttgtgagcctcccctctagtaccaacaattctccacacctgggtcaggacctttaccctaccaccttttcactgcctcctcttgtcctcatatttgaatttacctatgttaagttgtagagtcaatcattagaattgctcctttggttatactcttaactctcttgtttctcttctgctttgacctattattttggcaaaactccagccctgattaaattggcctcccaacgtattaatcttatgtacccatttagctgagaacagctggcctgtaatgttgcctggtaagaatgccctacttgtctagtcaaatttattccccttctcttctagacaactgtttcatgtttcctcctcttcttaaacctgcaatatatctttccttgtcctcactttcagctggtgatataattccttgtttcaacgagaacattcaagcattcaaaaaagaacttgcataagctcccaccatcacaattacccacttacctgcatctgtgtccattagcctgtattccccccattactgtggaatactcaactggattttcaactaaggctaaacttagctttggtactatgttctatctttcatgcttttccaaagacattattgtaacagtttttcctctttcttctgcttcatcaaaattttcctttctactggatttttcttgtcagtgaatcagtaagttgttttattctccatctgaaaaaatacatatatctcaatccacttccttccccaggtacagtgccatttgtttcctcttatttatagtcaaacttcttttaaaagtagccagtactcttctagctccaccattgctcacttctcattctcttttaaatccactctaatgagactttttctctactactccacgaaggtcaaacttcctctctatattgccaaaccctatggtagatgcttggtaaatatttattgacatttttccacagctagctcagtcctccttgaaaacttttctttgacttccaggaattcacacctttaaggctttttgtcttattggcagcttcttctcagcctcttgtgctagtccttgtatctctttaatctcttaattgtgcaaagtcccaaagctcaggatggatacctcttctcaatccatctgcgcttactctctggtcctcatttggtctttgttttaaagacatcttcacactagtgattctcaagtctatatctgcagtctgtatttctaccctgaacttcagactcatatatacaattgcttacctaagtctccatctggatggctaataagcatctcaaaccgtacatgtcaagaactgacctccttatgttctcctcccttcctcatcctgatttttctagagactttctatctcagcaatggaacactatccttccagttgatcagtctaacatgtggtgtcatccttgatcattttattttactcacacctcaagtctatgccattcagaaattcggttggctctatctccataacacacctcaaatcccaccacttccacttctactgtatctgctacaaccacgctgacttaagtcaccatcaacttttgactggattaggttcatagcttgttagctagtttccaagcatctgatcatggcctcttcaatttatccactacagagctgagagtgtgctgctgctaaacaagtcaggtcatgtcactcctctgctcaaaactgtctggtgggcccccatatccccttgagttaaaatccaggtcatcatcatggcttggaagcttataaagtaactttggtcagtttttaaaaatggctccccctctctgccttcagtgctttatatggctaaaccttgataatgtggctggtgcctttgtaagaatgaaagtgctctgaccccccactggcagataccaccctgccccagagctcacacctcggcaagtagacagttggctccctcaacaggcattttgtgcagtgcacacactgcacagctgtcctagctctattcagctgcctgatcccttcccattaattctctgcattcattcttcaccaatcttcactgcattcactctgaccaatcacactgccctcctcactactctttggacatgacagacattctttcacctcaagagctgttttccaaactcaaatttctttctccaggtattatccacaaggtccactccttcaggtctttgttcaaataccaccattgctatgaggtcttccctaactctccatttgatattatagttatttcttcctctactctgtatccctcttaaagtttttaaaaattttcttcacagatattacctaccatctatttcatattccacttgtgattttctttctgcatgtttgttgactgtatttctgacctgaaggtacactccaagagggcaggagatttattttacttttcgttgttgttaattgctgattccccaggacctacagttccacatgctccatagtaggcattcaaatccttatcacataaatgaagatatagaaagaggcttttttctttttccatttttactttagaatcaaggggtacatgggcaggtttgttgcttgggtatattgcaggatgctgaggtatggaatatgattgaactcatcacctaggtagtgaacacagtatccaataggtagctttcagcctttgccccgtctgtctctcccacttcttttttttttttttttttgagacagagtttcactcttgttacccaggctggactgcaatggcgcaatctcagctcactgcaacctccacctcccaggttcaagcacttctcctccctgagcctccccagtagctgggattacaggcacccaccaccacgcccggctaatttttgtatttttagtagagatggggtttcaccacgttggccaggctagtctcgaactcgtgacctcaggtgatccatccgcatcagcctctcaatgtgctggaattacaggcataagccactgtgcccggtctgtctctcccacttctagtggcccccagtgtctattgttcccatctttgtgtccgtgtaacccaatgtttagctcccacttacaatgagaacatgtggcatttggttttctgtgttagttcacttagacaatataccacttctcatacaaaaactagccaggcatggtggcaggcacctgtaatcccagctacttggtagactgaggcaggagaatcacttgaacctgggaggcagaggttgtagtgagccaagatcaacccgctgcattccagcctgggcaacagagtgagactctatctcaaaaaaaaaaaaaaaaaaagaatgtaccacttctctctctgacctatttctcctccactaatcaatatttatttcctttcctcacattctagttattcctgaatgtaggttctcgagttcttcttccaaatgcatacttactatctgccatgcacatccattgacctcactcatatattttttctccattgctcaaagatttccagatcaaacactcacatagtatgattaattggaggaaagcttctactacataaatattgtattggaaaacaataaagatggagacatttaatcttttaagcccagcacatatatctgtttgtaaaattaactctccaaagagagtgagaagtgtaaaccaaatggtattttaggatgatttcaaaaatagcagaggagcctcagtgaatcatgaatataatggttgtttctgttgatgtataattaaacattaagcaaccccaattgttataagagacatttaactgaaatccatcggcttcaaaggcacaaagaagtgcgttcttctgcacagtactgcattttcctctttggttataaaatgttaactggggaaatgtgagctctttattatctttggcaaacataattttccttttctgtcaagtgactgtaatgtcattttcttggtaacacctctggccttggaaagtttggcttaactttattgatctctttatacatttacaacaaaacaaacatattttgtttgtagaaatatgtcatttgttgctctttgtttgagctcagctggcgaatgggatgagaaaccgaattttaagaaaagaacaacagtgccatttgaacagctgcaggaatggatctctgaagcaaacagctgggccacataatatgtctcagactgagctcctttggcctcaaattggggcctgaaaataaaagagaagggcctgagagacgggtgatgtggagctggaagcttgcattttagttgtcaaattcatagcatgttcatgccaaattgaatcctattactttccatgagttagaatggcaggtttttaaagctacttctgagtttcaaaaagttaccactgtcaaagtcattcaggccatacagggatagaagatattctttctacacctatcccagaaaacagtgatttcatgccttgtaccagttacaaacatgcccagtaacaaggaagtccataaaccacctgatttctgtccaccaaatgagctatcaagaaacagcctcggggaggagccaagatggccgaataggaacagctccggtctacagcccccagcatgagcgacacagaagatgggtgatttctgcatttccatctgaggtactgggttcatctcactagggagtgccagacagtgggcacaggtcagtgggtgtgcgcaccgtgcgcgagccgaagcagggcgagacactgcctcacttgggaagcgcaaggggtcagggagttccctttccgagtcaaagaaaggggtgacggacgcacctggaaaatcgggtcactccaacccgaatactgtgcttttctgaccggcttaaaaaatggtgcaccatgagattatatcccgcacctggctcggagggtcctacgcccatggagtatccctgattgctagcacagcagtctgagatcaaactgcaaggctgcagtgaggctgggggaggggcgcccgccattacccaggcttgcttaggtaaacaaagcagccaggaagctcgaactgggtggagcccaccacagctcaaggaggcctgcctgcctctgtaggctccacctctgggggcagggcacagacaaacaaaaagacagcagtaacctctgcggacttaaatgtccctgtctgacagctttgaagagagcagtggttctcccagcacgcagctggagatctgagaacgggcagactgcctcctcaagtgggtccctgacccctgaaccccaagcagcctaactgggaggcaccccccagcaggggcacactgacacctcacaaggcagggtattccaacagacctgcagctgagggtcctgtctgttagaaggaaaactaacaaacagaaaggacatccacaccaaaaacccatctgtacatcaccatcatcaaagaccaaaagtagataaaaccacaaagatggggaaaaaacagaacagaaaaactggaaactctaaaaaggagagcgcctctcctcctccaaaggaacgcagttcctcaccagcaatggaacaaagctggatggagaatgactttgacgagctgagagaagaaggcttcagacgatcaaattactctgagctacgggaggacattcaaaccaaaggcaaagaagttgaaaactttgaaaaaaatttagatgaatggataactagaataaccaatacagagaagtgcttaaaggagctgatggagctgaaaaccaaggctcaagaactacgtgaagaatgcagaagcctcaggagctgatgcgatcaactggaagtaagggtatcagcaatggaagatgaaatgaatgaaatgaagtgagaagggaagtttagagaaaaaagaataaaaagaaacaaacaaagtctccaagaaatatgggactatgtgaaaagaccaaatctacatctgattggtgtacctgaaagtgatggggagaatggaaccaagttggaaaacactctgcaggatattatccaggagaacttccccaatctagcaaggcaggtcaacgttcagattcaggaaatacagagaacgccacaaagatactccttgagaagagcaactccaagacacataattgtccgattcaccaaagttgaaatgaaggaaaaaatgttaagggcagccagagagaaaggtcgggttacccacaaagggaagcccatcagactaacagcagatctctcggcagaaaccctacaagccagaagagagtgggggccaatattcaacattcttaaagaaaagaattttcaacccagaatttcatatccagccaaactaagcttcataagtgaaggagaaataaaatactttacagacaagcaaatgctgagagattttgtcaccaccaagcctgccctaaaagagctcctgaaggaagcactaaacatggaaaggaacaaccggtaccagccgctgcaaaatcatgccaaaatgtaaagaccatcgagactaggaagaaactgcatcaactaacgagcaaaataaccagctaacatcataatgacaggatcaaattcacacataacaatattaacgttaaatgtaaatggactaaatgctccaattaaaagacacagactggcaaattggataaagagtcaagacccatcagtgtgctgtattcaggaaaccaatctcacgtgcagagacagccataggctcaaaataaaaggatggaggaagatctaccaagcaaatggaaaacaaaaaaaggcaggggttgcaatcctagtctctgataaaacagactttaaaccaaccaagatcaaaagagataaagaaggccattacataatggtaaagggatcaattcaacaagaagagctaactctcctaaatatatatgcacccaatacatgagcacccagattcataaagcaagtcctgagtgacctacaaagagacttagactcccacacattaataatgggagactttaacaccccactgtcaacattagacagatcaatgagacagaaagtaaacaaggatacccaggaattgaactcagctctgcaccaagcagacctaatagacatctacagaactctccaccccaaatcaacagaatatacatttttttcagcaccacaccacacctattcccaaattgaccacacagttggaagtaaagctctcctcagcaaatgtaaaagaaattataacaaactatctctcagaacacagtgcaatcaaactagaactcaggattaagaatctcactcaaaactgctcaactacatggaaactgaacaacctgctcttgaatgactactgggtacataaagaaatgaaggcagaaataaagatgctctttgaaaccaaggagaacaaagacacaacataccagaatctccgggacgcattcaaagcagtgtgtagagggaaatttatagcactaaatgcccacaagagaaagcaggaaagatccaaaattgacaccctaacatcacaattcaaagaactagaaaagcaagagccaatacattcaaaagctagcagaaggcaagaaataactaaaatcagagcagaactgaagtaaatagagacacaaaaaacccttcaaaaaattaatgaatccaggagctggttttttgaaaggatcaacaaaattgatagactgctagcaagactaataaagaaaaagagagagaagaatcaaatagacgcaataaaaaatgataaaggggatatcaccaccgatcccacagaaatacaaactaccatcagagaatactacaaacacctctatgcaaataaactagaaaatctagaagaaatggataaattcctcaacacatacactctcccaagactaaaccaggaagaagttgaatctctgaatagaccaataacaggatctgaaattgtggcaataatcaatagcttaccaaccaaaaagagtccaggaccagatggattcacagccgaattctaccagaggtacaaggaggagctggtaccattccttctgaaactattccaatcaatagaaaaagagggaatcctgcctaactcattttatgaggccggcatcattctgataccaaagctgggcagagacacaaccaaaaaagagaattttagaccaatatccttgatgaacattgatgcaaaaatcctcaataaaatactggcaaaccgaatccagcagcacatcaaaaagcttatccaccatgatcaagtgggtttcatccctgggatgcaaggctggttcaatatactcaaatcaataaatgtaatccagcatataaacagagccaaagacaaaaaccacataagtatctcaatagatgcagaaaaggcctttgacaaaattcaacaacccttcatgctaaaaactctcaataaattaggtattgatgggacgtatttcaaaataataagagctatctatgacaaacccacagccaatatcatactgaatgggcaaaaactgggagcattccctttgaaaactggcacaagacagggatgccctctctcaccactcctattcaacatagtgttggaagttctggccagggcaattagacaggagaaggaaataaagggtattcaattaggaaaagaggaagtcaaattgtccctgtttgcagatgacatgattgtatatctagaaaaccccattgtctcagcccaaaatctccttaagctgataagcaacttcagcaaagtctcaggatataaaatcaatgtacaaaaatcacaagcattcttatgcaccaacaacagacaaacagagagccaaatcatgagtgaactcccattcacaattgcttcaaagagaataaaatacctaggaatccaacttacaagggatgtgaaggaccccttcaaggagaactacaaaccactgctcaaggaaataaaagaggagacaaacaaatggaagaacattccatgctcatgggtaggaagaatcaatattgtgaaaatggccatactgcccaaggtaatttgcagattcaatgacatccccattaagctaccaatgcctttcttcacagaattgcaaaaaactactttaaagttcatatggaaccaaaaaagagcccgcatcgccaagtcaatcctaagccaaaagaacaaagctggaggcatcacactacctgacttcaaactatactaaaaggctacagtaaccaaaacagcatggtactggtaccaaaacagagatatagatcaatgaaacagaacagagccatcagaaataaagccgcatatctacaactatctgatctttgacaaacctgagaaaaacaagcaacggggaaaggattccctatttaataaatggtgctgggaaaactggctagccatatgtagaaagctgaaactggatcccttccttacaccttatacaaaaatcaattcaagatggattaaagacttaaacgttagacctaaaaccataaaaaccctagaagaaaacctaggcattaccattcaggacataggcatgggcaaggacttcatgtctaaaacactaaaagcaatggcaacaaaagccaaaattgacaaatgggatctaattaaactaaagagcttctgcacagcaaaagaaactaccatcagagtgaacaggcaacctacaacatgggagaaaattttcgcaacctactcatctgacaaagggctaatatccagaatctacaatgaactcaaacaaatttacaagaaaaaaacaaacaaccccatcagaaagtgggcgaaggatgtgaacagacacttctcaaaagaagacatttatgcagccaaaagacacatgaaaaaatgctcatcatcactggccatcagagaaatgcaaatccaaaccacaatgagataccatctcacaccagttagaatggcaatcattaaaaagtcaggaaacaacaggtgctggagaggatgtggagaaataggaacacttttacactgttggtgggactgtaaactagttcaaacattgtggaagtcagtgtggcgattcctcagggatctagaactggaaataccatttgacccagccatcccattactgggtatatacccaaaggactataaatcatgctgctataaagacacatgcacacgtatgtttattgcggcactattcacaatagcaaagacttggaaccaacccaaatgtccaacaatgatagactggattaagaaaatggggcacatatacaccatgggatactttgcagccataaaaaaggatgagttcatgtcctttgtagggacatggatgaaattggaaatcatcattctcagtaaactattgcaagaacagaaaaccaaacaccgcatattctcagtcataggtgggaattgaacaatgagatcacatggacacaggaagggaatatcacactctggggactgtggtggggtggggggaggggggagggatagcattgggagatatacgtaatgctagatgacgagttagtgggtgcagcgcaccagcatggcacatgtatacatatgtaactaacctgcacaatgtgcacatgtaccctaaaactttaagtataataaaaaaaataaataaaaaacaaaaaaacacagcctcatcatgactgacacttttgattgacaccaatttacgtaagagctattttcctctttaagggctcttagcatattcaaatagtatttcttgtgtccatctaagtagcaaaatatgtttattaacttttagagacacgtcttttcaaattaaaaaaggtatacttatttaaacacttaaggtgtcattgttttatcttaaccattcacctcctcccacccatgttaacatgtattagtccgttcttgaactgctataaagaaatacttacgactgggaaatttacaaagaaaagaggttttattggctcatggttctgcaggctatacaggaagaaaagcagcttccgctcggctgctggggaagcctcagaaaacttttactcaaggcgaaggcaaagccagagcagtcacatcacatggcccaagcaggaaagagaaaaagtcgggaggtgccactcacttttaaaccaacaagatcgcctggcgcggtggctcacgcctgtaatcccagcactttaggaggccgaggcgggtggatcacgaggtcaggagttggagaccagcctgaccaacatggcaaaaccccatctttactaaaaatacaaaaaaattagctgggcttggtggtgcgcgtctataatcccagctacttgggaggctgaggcaggagaactgcttgaacccaggaggtggaggttgtagtgagccgagatcgtgccactgcactccagcctgggtgacagaacgagactgcctcaaaaaaataaataaaaaataaaataaagtaaaacaaccagatctcaggataactcactcactatcacaggatagggcaccaagcggatggcgctaaaccattcatgagaactctgcccccgtgatccagtcacctcccactaggccccacctccaacactggggattacaattcaacatgagatttggtggggacacagatccaaactatatcatcaccactcttaaagacatgctattgggaggccgaggcgggtggatcacctgaggtcaggagttcgagaccagcctggccaacatgatgaaacctcatctctactaaaaatagaaaaaattagctgggcgtagtggtgcacgcctgtaatcccagttactcaggagtctgaggcaggagaatcgcttgaacccagaaggcagaggttgcagtgagccaagatcgcgccactgcactccagcctgggcaacaagagcaaaactccatctcaaaaaaaaaaaaaaaaaaaaaggaagacatgctaaatattttcttttttttcaggcagaaacttcaattaatacactgaatgttcttttactatcaaatgcagaaactagaaaccagaacattcaattatttaaaaacaaaacaaaacatacaaagtcacagaaacccaactactcagcccatatctctgacctggccatgcaagtaagaaatttgtccactttcttcatggccctttttgcttctgccagtgtgtgaggtttgtgaggtctgtttgatttcctttcctacacgcaggcaaagcgggttaacaccaatgtcaatggatgctgtgttaggctgttgttgtgttgctataaagaaatacctgaagctgggtaatttataaagaaaagagccttaggctgggcacagtggctcatgcctgtaatcccagcacttcgggaggctgaggtgggtggatcacttgaggtcaggagttcgagatcagcctgaccaacataatggaatcctgtctctactaaaaatacaaaaattagccacgtgtggtggtgtgtgcctgtaatcccagctacttgggaggctgaggcaggagaatcacttgaacccaggaggcagaggttgcagtgagccgagattgtgccaatggcctccagcctgggcgacagagcaagactttttcaaaaaaaagcaagcaagcaagagagagagaaggaaggaaggaagggagggagggaggaaggaaggaaggaaggaaagaaggaaagaagggagagaaagaaaagagctttaattgactcgtggttctgcaggctgcacaggaagtgtggtatctccttctcatgagggcctcaggaagcttacaatcattcaagaagccaaaggtggagccagtgtgttagatggtgagagtgggagcaagagagagaagaggagcagccagggttgtttcaacaaccagctctcctgtgaactgaggaagaacccacttgtcactaaggagatagtgctaaatgattcatgagggatccaccctatgatccaatcacccccaaccaggcccgacctccaacactggaaattacatttcaacatgagatttagaggggacaaatatcgagactatagcagatggtgttttttccaaaagttttctttgctgagtttaaaaagtgatgtatacaatatatccttagagacttcataatgatccttagcatagcagagtttttgagaagtccaacaacaattatttaactttgtttcaccctgcaactctcacactttcttaagcaaaaacttttttccacagtaggatcccctcttctggtagctgggagaaaatcacctaggaatgtacgagactcaggcttttactcctagtaggacaagaaactattggagggtttttaacagaggaaggacttgatttcttaggatttatagggcccacctggcttctgcatgagctgtgactgagggaaacacaaaggcagaacatgatttaggaggctagtgcactcatacaggtgagcaaacaactgttaatttgaaccaggtggtaaaggtatagctgatgagaggagatcatttcccagatgcatttgaaaggcagagctttcaatattttttgacagatggaatatgtggtatgagagagatgactccaaggtttttttctccccaagcaaagggaagactctatgaggagcagattggagtatttagaagtaaatcatgaatgtcatttcggagatgttaactttaaaatgacaattagcatttcaacaatagccaggacagtctctgaaatcctctctctgaacttgaggtagttcagtgcagtgcctatcaaccctggcagcacattagaattgcttgaggatatttaaaaattctgatgctcaggatgctaccaaacaaattacctaaatatctctggggtggattaagccactggtgtttttgaaaccctccaggtgatcccagtgtgtgacaagggttgagaaccactggttcagaggcatcagtggtttcaggtttgaaaggtcatgacactctttactgtttgtcaggacaaagcatatgcatgcttcctggatgtatggaaattggaaacaaggcaggcactatggctaggaaatagataattcccaggtttactctcactcttcaggcacactcccttcagtctctttaagtttctggaaatgtctagccttcttccttaaggcagttgttttacacattcttcacttaaattaggcagcattcatggtgcctggactcctggctcagagccagagccttttctcctggtctctggagaaccatgacaacaatccattactgagctacctgagaatgtaagagcacttcagagctgccctcacagcccagccaggagtagctacagttgaagccaatctgaaagcagcaggaattcaacagctctggatgaagggaagagacgaccaggagcattgcaaaataagagagtggaagggactcttggtcaaagtggaagagtccttagggagaagctcttggaactgccctcagtgaaaccaacacaaacatgtatgatgtttgattgcctgagtcctcatgtgaacacatccaaacatatcacaacacacacttaacacacaggccactcatatacacacaaaatatacaccacatcccccacatcacacacccctgtcatccactgcccctcccatatcaaacatctccggtaagcatgtcaatgggctcattcactctgtagatgaatgagggttaagtttgtaatgggctttctgtgcccccagaaaatttgtaatttaactgggggacacacattgcctgatgaactttgaaatttgaggtgtcatgtcccagtctccttccaagtccccccaaagctgattatttaggcactgacataccctgtccacctacaaagccactcttgagtaagggaggaatcaaggtggaagaaagccctcaaaacccctttgcccaggggaaaattttgtttaaggcactgactattaactcagacctcagtaaaagccctaaggggacagtgattcttctgcccaagtgcaacacgtgctgtcagtgcctacccacatcccaagtccttatctgtcagtgaacagaagctcaactttcaaagcccaggatctgcatttcttggcctgagggctttctctagactaagaaggcttctttgcctgcttctgtaccaagctagtagttgacaccaccaacaagcaactctcttcctgtgactgacagcgaggcatgctctgcacgggtcttctagaattccccatcgggattgagccccagttgtctacagtggtgactggcttgagcaaatactcttcattgactgcattcttttctctggctcactttcccatacccctaccaatgctttctgggattacctctcagataatctatctgcactgaaattcttactcggggtcagcctctatagaacccctactaagacaccaggaaagggggaagtcctctgcaagcatacgtgacaaaagaaagacaaagttcagtttgtcaaaagggaccagagtcacaaatatgtttacaaaaactctgtcctgttacctatacttgatttacaatgaccacttgggaaatttgcctctttgctggggtagggacctgactgaccatgtaaaggggaaacagatgcactcagcctgcggcctcacacatctgctggatgagcaacgactataatttgccaggaggagacaataaaaaaattcacataaaactttttattgtgtaagtgacactggttattgtagtcggcaatcagaaagttaccccgaggacagaacttttctgcctattaatgtagagaaaatggctagcctgcttcccacgtctcagaatataacactggagatgctaggattcattccagaggagttatgataccagcaaaatacaaaaaggatgtagcaaatgtgtgttacagtaaagatcataaaataaaatccaagcatttcagagctcttggggcaaattgaatccatgggaattgaaaaataaatggcttgaaaaaaagtatgctctttttacagagaacaggaaaataatatatttctcctttttatgaagagtaagctcttctggccccaaaactgtaactgagatatttcctaacatataaaaacattattttataaggactcacccacagttttggtatttgtaatcaggttttagtctaaaggtttccttttcagcgtggacagatgccaacacaggaatacaatttgtaaataatgagagtaatcagtatcctcctctatttgcccccatcatccaacctcccgtttgatactgacgctccctcctgcagattcagcctctgtgggagcagccagggtgccagcgtcttcacctactccataccctccattccaacacagctctagaaggctctgcattcaccgcagggtgtgggagagcttgggatgatgaaggggtcagttttacaacattagcatcatcaataaaccttaaatatttgaggaaaggggtctattctgaggtatcttttagcccaacccaagcgctataacaaagactagcatttgcatctgcttttataccccaagtcttgatatttaacaaaattaaaaaaaaaatagtgctcatatcacaacctaatgcatgttagtggaggggcaaagggacctagtttatgcagtcacacagggatctaggctgcccctgtatattggttctacaatgtcctaggacataggtcagcaagcattatgtttaaagagccagagagtaaatattttcagatttgtgaggcatatagtctctgtttcaactactgccactatagtgtgaaagcctccataaataatacatgaacaaacggccatagctgcatagcaataaaacgttatttataaaaacaaaaggccagcccacaggatgtagtatgcagacttctgaactaggatcttgaagctctctactgcctctggtcagcagacaaggaaaaagggagagtggaggatcaggattctgtgggagatatttttagggaccagacatggaataagcagtaacactttaccctcatttcattggtcagatcatgtggcctcagcaactgcaagggagcttgggaaatgtagtttaactgtatgtccagaatgtgatgaaagaattttgcctgcaattgtacagtacaatgtgtgagagaagcatgacataagcaatttcagaaagccaactacttggacttaagaatgctccatgtttccatgtggatgaattctgcaaatcttaattaggaattaaaagggatctggctggacttctgattattaaaaaaaaatctgctaatacattcatatatagaaataataaatatttctttttaaaagttcataattcttactttctttatgaacattggtcttcccccaaatactattaaatttacaagattcgactgcatccatgagcttggctaataaatcaagtttagttttcttatgtagctttagaggcaatattatcaaattcagagttttatttccctccaataatacttcagattgattattttcacagaatctgaaaatgtaacataattattttttaccattcaaggtgtgaaaggagactagatttagtagcattagcaaacccaaggggctgaaaggatacaaatgcaatttcatcagacactcttgctatgagaaaaagaatttttaaaaattcactgtaattgttctggtgtctggtttgggtcagaataagtaaaagacaaagaaataaatctaaagctcttgtcttcatttttcagccctcacgccttctaatgaggcagagctgtgcagataaatctaaaattttaataaggaaaaatgaaaaatatatgtagttggtgctgcagtgcccttctaagtcaccctgaaatttttaaagttattgtgattttttctggattctagatatattttgtatatagtgaaagtaacttgcaccaaatatcaaactacacttaaaattgcattggtttattttgttgttttgttttttagatgctgatgcttttttctttcttttgccaatgatgttggcttctggtgggcagtagttctgaaagtttagcatgcataagaatcacctgggaggcttcttaaatacaggttcctgagcctcacactcaggaagtcagcagatctgcggtcaggcctgagaatctgcatttgtaacaagcttccagtgatgctgatgctgctggtctggggccaaactctgattaacacagaatcaaaggtcgttccattggaaacccaactcaagctgatttagtaaataggaaatatataggcttgcaggagctaaaaattcaggctgccagtctgtctttagtcactatgaactccatcagctcaaatgagatcccgagggtccagcttttctctctttctcttgcagctcatttcccctgtgttgatatttctctcatggccacaaatggattctgatgctccagaccttacgttccatgtttccaagcccaacagacaaaacagacttttctcccatcaaccgatgaaaattgtttctattattggttataaatgagtcacacatttgtcttgagccagtccccgttttcaatgtaaccctagggatgcgatatccaaccagtttaaattaatctggacctacccttggatttacatccgcaagcacctgccttgtctgtttcttgtttgtttgtttgcttcaggggtctctccaaagcaaggagaggtctctcagcttgagcttagttgcagccttggcatgcatggggttgatgccgttagagcaactcctaatcaatgggggatggagttcatggatagatgtcccatctcccatctttcagaaggacagttattaagtgcatttaatatataatgtttcttataatgtcccagtaggagtctgttccagctgtccactctggaaacctgtgctatgatagaccttgcacagacgtttccttttctcctgtctctatctcttcactctttcaccctgcttctggaattacctgccaaataaactctctgtatctaatctttttctttacctaaatgaactgtagtttcctcattcattgataatatccacagattgggcttcttttacatcggaaaaaatattaaagaacctaaataccaatatactcaatacatggtcttcatttttatcactgacttggcatatttcattatctctgcattagtttcctaaggctgccattacaaagtactataccacaaactgggtgatttaagataaccaaaatttattgtctcacaattctgggggctagaagtccaaaatcaaggcatcagcaggcccatgctctctctgaaaccgatagcagggaatgcttcattgccacttcctagcatctggtggtggttgcagagattggagcattccttgatttacagctcatggctccaatctctgctgtcttcacatagttttctccttgagtctgtgttttgccttgactaccttcccatcttataaggacaacagtcatactggataaaggggccatcctaatcacctcatcttaacttggttatatctgcaaagatcctgtttcttaataaggtcacatttatagaaaccaagggatagagtatatcttttgggaaaatacaatttaacacgttaaattcataggaattcacgaatattccacctaacccacctcttgtatttcaacctttgctctaatctttttcaactcatcaacctgttgccactacagtacatttcgtgtccaggaaggaaacaagtttctgattcagagaaaactgcagggacagcaacttcctaaagctttcagacaaaaaaaaaaaaaaaaaaaaaaaaaaaaaagcctgagactgccaggccctaaatgccaaacagcttagagaaagagatttaaagctcgtaaatatcaaagagcctctggaacactgggggcaggaagaacaatcctaaacacagtgaaacataaatgaaattgcattgggttcattggctgcactcctagggcaaaattatcatcctctttccaaaaggagcatttagcacaacattagttgggaatggttattgtctttttggaatacaaaatataaattatttttatagcttatggcagaagttgacacacaacattacattattctgtatttccactcagatgaacacaggtaggattgtagccccgatagacactttgggactgatttaacctagaccttaatcaaaaggtcacttacctgcccacaaaatgataatctcaacttattccccaactctaatgggattattatttatactttatgtttcttttctgattagaggaaaaaataaattgccattttacatacagaaaataaataaataaaaatatcctataagctcattacttatatatttaaaaagtataagcttattacttttttaaaatttcatcacgtaatctttggaaccatgatgtttaataacttcctagtactccattgcctgatgtaccataattgttttagttgacaccctatcatgaaccatttactttgttgctatgatttttattcttataaaaatgccataattatcatctttgtacctgaattgttgtgtgcactctggcattattcttaatttcatatcctgagttccaacagtcaaaatatgtaaactttctgacatagaaccctgggtcatcttgaagaagaaagtaaacacacctgcagctgtccaagtctcaacaggttcatatgtcaggagtcactgataagaaagtaaaaatgagccctttctgtttccatattcttaggctgtgttcactcacctatctgcatgcacagatgagaagggtccaccttgggctgttctctgaaatctcctcatttcttattttcatgggtcttggaaagagctgttaggaaaatcttgaacttcaatctatttgaatgtgctataaccaggtagaaagtgggtttgtcaagggctccccaaagtgagtttgtcaagggctcccctcagtgagtttgtcaagggctcccctcattagacacagaacatttgcagtgcatacatacattgtgctcctcctgatcactgtgcctcaatcaatcagggcaattagaggtcttgttgttatgtcccttcccccatgcactcccatctttcagagccaatcaagaagcaggtagtgagtcactccttaacccaaatctaccttggccaggttccaacatttttcttattttttgctctctcctacagcagagggacctccattcttcaatcatatctttggcgatttaaatgactgatggcttgttgcacgtcgttatccaggcttggagagaataataattgcacaacccctctgatcagggaaataagatacagaattctgcttaaaaaccatctcattacctgacagagtacaggccaaaagccaatttggaaaaaatctattccagtgtttgctctttgctgaaggtgagagctttctcatctaagtttgtgaacagttcttatctgtgatgaaagaacaaaatatattgagggcacgctgcaaaaaagaagcttcatttatgtctttctggaagatgactttttgctattcaaagtgtggtgcagcctcagcatcacctgctagttagaaatgcagattctctgaccaaccaagatattctgaaccagaacttgcattttaataagatccccagatgatttgtatggatttcaaggcttgagaagcactagcatgtgcttctgaaggtactggcatccagctgccagaaagaagcccttttaaaaacacaacttgcatatgtgcatagagtgtgaaatgacagacattggagactcagaaagctggaggtgggaacagatagatgatgagaaattacttaatgaatgcaatgtacatgattctgggtgaaggatacacttaaagcccagatttcatctctatgcactatatccatgtaacaaaattacacttgtaccccacaaatatatacaaaaaactttgcttataaaacaaaacaaaataaatgcaaaccatcaaaaacttttctccctagaagaacatttaggttcctccaggatgcagttgaacagtttgtaaggctaacacccaaaaattaattctaagggatgggattcgtttgtctggatctcctttcatttctaattacataattttaggtagtttaatttattaaaaaataatacaggtacacagtaaaattttttaaagcataggcataaaactatatatatttaaaagtaagacctcattctaggtacttaatttcattcctagatgtaatcactactaatagattttatattttgtataactttccagaagtagtctaatgtatacgtgtgtgcatatatttatttatatcttaaaataaacttttgtatgagctattctgccctttgctttttagcaacttttaaatatcccataacagcacatagagagatacaccttattgttttcaatatttacataatattttgtatatgtttgcatgaaaatttgccttgttttatttgcctattccaaatgatgttgcaatgaatatctctccgcatatgggtttgtacacatgtgtatccatctgtaagacaaaaacctatgagtaaaattaccagttctaagaaaaggagaacttaaaattttgatggatttcaccaattgctcttcaaacaacaccatagatgtttagcaccccacgaaccattcaaaagacttgtgattttcctatatccctgttgtactaagatatcaaccccagaaatgtgtaatctgacagttggaagttagtatcctatttctatttaaatatacatttcttttattatgagtgaatttgagcatatttgcatgtttaaaagccatctgtatatctatttgtgaactgtttgtttactttcttcagccatcctttttggaggaaaaaaaggtctttttctgactaatttatcaaaactttttttatattaatgacttcataaattaacccttagagggtgacacatttcacaaacatttctctcagtttgtatttcatcatttttctctttgttatattatttttcttttgaacagataatgcttttacctagtttaaatattggaacaatgtatgcatgttatgaattaagaagtctcactcatttttatacctgccgctgtctactccctagcgacctccttgtgggtaaccatgttcattatttcttgtgtatgtatcaatgcttatgtaattataaacaaatacacatatacaaccttatttcctcctcttttgtagaaaaagaatttcacttgcaatgttcttgcttatttttcacttagaaaaacatcttagagacctttccatatcaatagaaagcaacttcatcatttctctttttttacagctgtatagtattccactacgtgattgtagcatactttatttcatcaaatttgtagtgacggacatttgttttgtttccactttttcactattaaaaacaaatttgcagtgaataaccttgtaaccatatttatatttcatgtgaacaaatgtatatataaaatatattcctagaggtaagattgctgagacaaaggatatattaatttgtaattttgataaatattgccaacttttttacacactctttttcatttttactagcaacgtgtcaaactttctatgttggccaaattatgaattactgccatatgattaataaaggatggcatttcactgtggttttaatgtacatttcacttttcatgagaaagagtgtacaaacagtttaagggccgtttgtattttattctgttaactgttatttatctgttcatatctttacctagtttatcaccagattgctgtctttttagattattggaattttactatgcatatccaggtacgagtcctttgtcttttatatcacttaccaacattttaaaacaggttattattcttcacttaatgtttcccattttttcgtgtaggactttaattttttttgttatttatcacccatatttatgtgttatgtctttgattttgaatcatatctataaaggaattccctaatccaaatttgtaaaataatgtgaccatattttatttcagttccttcaataattcactctatttgaggcttattttagtttactacataaagtatggccctaacaccattctttttccaatagttaccaatatcatttgttaaatatatatatttatatcttctttcccactagattgagatactgccttaaacatattctagatactacgtgtatctgaaactacatgtgtctgaacatcctgctgtgttccatttgtctgactattcatgtgccaatgctgtactattttaaatagtgagttttcctggtatgctttatcttgagatagagcttggtccctttcactgctcttcatatgtagagatttcctgacaaatattgccagttcattttctatatgaatttaaaatcagtttgaatagtcctggggcaaaggatagagacttgttgacatttttatcccagtcatgttaaatttataaattaatttagagatatttggactcatcatattgtagaatattctcatgcaagaatctgctctttccattttctcggatccatttttttcaagttgtgttttaatgcgttcctcctatattgtttgcacatctcttactatgtttagcatggtgttattctgaatgtaaaatgagtatgttttacattacgtattctaactgatcactatttgtacatatgaaggaatagttttcctgtttttattttataccctgatatataacaacattctttatttattggtcatagttttcaatgggttctcctaggcttcctagatatttaataatatcatctggatataataatagatttaccattttccttcatgttattttattcatttaagacaagatacataggggaactcacctctccccaccctccacacacacaagtaagaaaactgtatacaagaacaaaggagcaaaattctaaggaatctcaggaatacttacaagggagtctcacagaaagctgaagtcacttcttaggaaaggagtcaataaagtttgaattgttcccagtcaaacgaaggacttccttagtacccacatgttggtcttgtggtttatagaggaatatatatattttatgtatatattttatatatattatatatatttcatatatatattatatattatatatatttcatatatatattatatattatatatatattttatatatattatatatgttatattatatatatatttatatattatatatattttatatatatttttatatatatattatatatatgaaattttttttttaagacaatgtctccctctattgcctaggctggagtacagtggtgcgatcttggcttactgcaatctccgccttctgggctcaagtgattctcctgtcttagcctcctgagtaactggggttacaggcatgtgccatcatgcccggctaatttttgtatttccagtaaagatggggtttcaccatattggccaggctgctctggaacttctagcctcaagtgatccacttcagcctcccaaagtcctgggattacaggtgtgagccaccacaccaaggcctatgttttggaatttattttcttaagaactgagtgcataaataatcttttatcaacaatccatggatatttgagagaaaagcaatctcatttatttttacacaagaatctgtattagtcagtattcttcagagatagatagatacatagatagatagatagatagatagatagatagatagatagatagatagatgggatttattagagaaattcactcatgcaattatggaaggtgagcagtcccatgaaagtctgtctgcaggctggagactcagagacgctggtagcatcattcagcttaagcccccgagagccgcagaaccagggaagctgatagtgtaatttgcagtctgaggctaaaggcctgaaaaccctggtgtaagtccttgagtcccagaaccctgtatataccactttaatttggtaatggagtgctgtcatgcatacccaatttatgataggaagctcacgtcagacggtaacttggtggcccatggtcaagtgttcattttctactaaggaaaactaagacctgcctctcaaaagcagagtaggtatctgcagaggatgacagggctttgctcccaaatcctaaggcactctgctgtgattcacctatagagtcctgccaaaggctccaaacagcatccctgtctgctactgacacctcaagcaccattgcatctgttggaccattggcccaaatggcagagcactttgcacagcagcctggacttgtggcagagtcttctcctgttctgggccctactcaaaactagcagcttttcaggtctgtcagtagatgggctgaagtaatacacccaaatgaggaatgtgttgcctcgaaaatataaataggcccactagatattgtgcctctttcttggttgtaggagcagctagaagcagcttcgtatcctttatcttagaagggatttcttgacatggctcaaaccactggacccctagaaattttgctgaggtagaagacccatgaaatttagtaagatttacttcccatcctctgatgtgcaaatgtcttatcaataagtttagagtaattgctacttcatgttcactaggttccatcagcataatgtcatcaatgtaatggaccagggtaatatcttgtgaaaggggaaggtaatcaagatccctgcaaactaaattgtgacatagggctggagagttgatatgcccctgaggtaggtcagtgcaggtatatttagccatgccagccataagcaaactgcttctggtgagccttatggaaagctatggagaaaaaggcattcgccagtccaatagctatgtaccaagtacaagaagacgtgttaatttgctcaaacagtgaaaccatatctggtacagccactgcaatagaactcaccattggttaagcctctaataagccactatcattctccaagatctaggccaaatagaagaattgaatggtgatgtggttggaatcaccacccctgcatcttttaagtccttgatggtggcactaatttctgcaattcatctaggtatgtggtattgttttcttatttatcattttcctaattagaggcagttctaattaactatcatttggtctttctcacaataatagccctcacctcacaggttagggaaccaatgtgcaaattctaccagcagctaggtgcatctattccaattttgcatctggaactggggaaatagtcacagagtgttttagggacccactgggcccactgtgtgtcagaactgagctaaaacaccatcgttggcctgagcttcataagctcctactgtaactggagggccacagtgacatttctggtctcctggaatcaaggtcagttcagagcctttgtcccagtagtccctgaaaggtcagatgctttccttttccccaatgcacagttaccctggaaaaaggctgtaaggtctctttcaggagggatgagagaaagagtaactgtatacatttttggaagtgtcctggggtccttcctggaggtgacccagcctctccttcatataaggtgttgtaggtctgtaaactggctcaagtttgagaattgattgatgagtcatgattctcgtcgacgtaattcaagttagacttttgttcacttgaccagaaagttttctgcttatacagatcaagtaagattttagtaggcttcctatttatttcacatctaagaacaccatacttaaccagccaatgccatagatctacacgagtgggagcattctgatttttcctttgcctctgttgttcattacagtaactatgcccaccttgcctttgacagttgagtgctgccacttgacgcctgccacttcaggatccaattattcctactgcatttaagttttccaattgagtgactgtggctcctatggtaagatctggcctacagagagaagcagtatcagagctcttcagacatgctgtggctctcctcacaaatctctttctcatcatctattttcttatttattttagtgtctagttgatctgtcaaaaattaaagaagtataataaatcctcccaaatctgttgtgcttctgtgtatatctcttgtttcctcagttaaggttatatctattttgacattctgtttttcagcacatacagactcatgaggattataatttgcatgcaacaattccctttgtactgttagcatgctttctgctttgaattttactttgtctgatatttatattgtcatctctctgtttacttagactgcctttctccagttaaatttgctcatcactttctgtttaaccttttgaatcattttattttagttatctgtcgtagaccacaaacagttgggctttcgctttatgacccatctgcgaacgtctacattttagtataggagtttgactcgtttgtgtttattgtcagagttgatatgcttattatatctgacaactttctttctacttattatttttacatgcttcattgtggcttcatttgctgtttctcatttgctatatggcttatgttttgattttattttttcctctttttgatatatacattttctatataaaatcattcatggttatacttaagattttcaaaaatattcttcaacctgcaatcctttttgcattaaagttaagaacaatataataaactatgattttcttccctgctagaagaacaatttggcacttttttgttctacttgctattctccgatattcggctacttacttttatgatatatatgttcagagctatataattctaatttcacaatattttaatataacagtaatatctttcaaaaagaaaaactggaattggcgttcaattttgtaatcacatttttcagaatttcataaaccattttattttaacttctctcagtgatcatcacctgcagttgtgcaccctgcctacgcattcttgaatgttgattaggatttctcctctagctacttggcactttagtgaactcatgttttcaaggatggtacacaggcattttagaatctgacctcttcaataaataacatcctttctgtagcttacatgcattaaataaagagtagctgcaaaatatgaattagataacctttttcccacaaaactggtcagttgtgattgctttactctcggtcatttactgtttcacaaaagaaatctccattttgctaaatacttggggttttcttgagacctgttgtttctccttggaagttgacaaaatctttttgtaatatttaattaatttttctatgtttgttgacacttacctaaaatatgttaacatgtttcagtatttttatgcaagtctgtttggggccagaagaaatttttttcatatacatattttgtatttttacttacgttttaattttcaatgttttatcctctattatactttcaagtcttaggctaattctctatcctcaattctattttttttttatcttttcatttgtatctttttcctgtggcttgaagtcacttgggaaattgtttaaacttgtgatgtctactggcatcctaaaaatagataatgtgagtgtttgtgattagatcaagtcacctccaacacgccaattcagccacatgcctctttctatcactaacatattctgttccccataagtaataaacagaaagataatcagaaaaagcaaatggcaacagctttaatgtttatttttgggaattgtatgccaaatacggatgccattgggccaccaaagatcacctaatagatatcttgaaggttttgtttacatagtcacctgcaaaaaacttcttaacagtcatacaacacacctggttgtctccaacatcttgtcctatataacattatccattaagtcctccctgaaccattaaataaaatacagttgccaaaattgcatggctctagagaatagagtccatgtggtgtatcacgtttgtttggactcaggacacaccaccctaaaatatgactacaggagaccagaatatgccaactcaaaatgtatttttgtgacatgtttcaagctggttattttgagaaactgcagaaacaggagtagctctgaaaagctgttcttttgtaaaagaaatttatatctgtaagggaaatctacattgtaaagtatcagtatcaggaagagggctgcttcagaccacttttattccctaagagatgttttatctacataacaagacaacctttattcaacatacaattccttgcctcaccttcctgtaactcatgtcttcactattctcccagaagccccaagtcccttttcctttaactcagggtatataggcttcttgatctctggggtgtcgggtattcacttttctttcgtatgatgccccagtgcatttgtataccttttctccttttaatctgttttacatcaattttctttgtagcccatctaaagaacctgggaggatggaggaaagccagtttttttttccctacacattgctcacaactaagaaaaccacaatcacaaaagcatcactagggagaggttaccgagggcatattcagtgttctctttttaacacaagatgttgctataggaaagatgccaccagtgctctcatatcgtcctggccctcatgcacatacatctaagggagcttagaatgaacacctgtgactctttgcctggtctgcaggagcacacttggcctaaattctgagcaatacacatgaggccctaagagctaataaccccagaaacagctttggatcaataatgaatgaggatttggtggataaatgccccagctccctcccattaggtggggagaacccagtggagtgccctacatggtctcccagagttccccagcacgatgctgctaatgatgctacagtggtaaagtcattgctagctcgctgttaaaaaaaaaaaatcaacagctttactgagacataatttacagaccataaaacttacccatctatactatacaatataattatttttagtgtatttgcaggttgtgcaatcattaccaggatcaattttagaacattttaatcactctgaaaaaaacacttgatatagctaactctttattaactaccttcccctctctgcttcacgtctctctactcctgaaccattgtttcttgagatggccactccagtaaacgacatgcactgaaattctctctaggtctgcttttgggaggatgtgaaccaaaacagtgacaaccagatagacaaaaataaatgactagaaaaacttaggtgatgctccatacaccatgtcaccagaaaaactttcctttgagcatccactagtttatatttacctaacagatgtcttgaaagttttctcctcctctaagctcagaaagatatttcactttcttgataatgcactatgttttatagtttatatgtaatttttattccattttaattcatcctcaaaggagtggaaatacagacagaccacatgtgtgaattgcccttaactctgcttcttctccacttgggtctggtcatttcccatcctcagatccacacttccagaacaggttgctttgcttacatcccagcaaacttcctcatacaagcaaggtagtatatcacggagttttgcagccctgaggggctgtattctcctaataccctactcaaatggggtcattccgaaatttcttctccacccctgtttaacaatttttaaaataccatattgactcagatattttattgtgctgtttactctttcttaaataatctccgcattctaccaatgaagactctatttcttctgcaaaaataccgatgcccacaggatgccaagcactggtagttagtagcttattctctaggattccttatgcttctctttaatgcttcccaagactaacagtatttgttcccaaaactgatatcaccgtctatacttgctactataattgttaacatatttgttactatatataattcaatggttatgtaaaacagtaaaatatgaatgataaaagagaaaggtattatttctatgagagcaaagctgattacttccaaagactcaaaggaaaattgtttaaaacagcaatgttgcatttgatttagagatctgtgagaaaactgtaaaatatttgaaaataaaattatatgtatatacactcatatacgtcttctgcaatcatatgtgcattacaggtcctatgagtttctttcatcacttgaaagagatgaaactggaacacttagaccagcaaatagttctcaaccttaaatgcacattagaatcacagtgaaagtttttaaaaagttgggactcactctcagattctgattctatttgtctaggacaaaacaggctggacatcagctattaagacttttattttgtttttacaactcctcacagaatctgatgtgcagtaagggtgctaaaggcatggaacatcttatcttcattttgattagtgactactcttctgtatgttgcaaaccttcctctacaagtggtttttttccttaatattgctgcatcaatttaaaattagtagcctttctttcagatgctggtagtatgttgtttgtaatctaaggtttcagtgaagttgcaagtttccattttttgctgagtcttcacagatattttagagggacactgcaggaggtagggtcaaacactcctatcctggtgaacttttaaattgaaaacagttctaaaaatttttagaaatatgttgaagcttagcatgctgcaagtaatgcttccttcctgctgctttagttttacattgacattttgtttaaggttttacttctttgtggttcatgttatgtcatagtttattattattattaattcacacaataagaatctataatacatgtaagaataattcaatgaacacatgtatacctactattcaatttataaaacagaaaattaccaaaaccttttaaactctactcagtatttctttccacatttcgtttcctcccacccactgttaaccaatttcctgttttgtagttatgcttcctgtttgaaaatagttttaacatatattaatgcatctttaagtgtacattgctttattttgcatatttaaccattaaatatatagaatccaatgtaccttttctgagactgtttccttttctcaatactattattttaatatacatccatatcaatatgaatatctgtaattatttcactcgtactgctgtatagaattctattatatgaatatacctcaatttatccatccattctgtaaaatgaatactacattagggtaatttgtagtattttgcttttgaaaacaatattaattttttttatgtgtacctagtgtaggcaagcaatcattgttctatttgcctggtaaagggatttctggatcataatatataaatacctgcaactttaatggttaattccaaagtatattctaaattgaatccaacagtttatattttcaacaacatcatatatctgtcaaatcttgatactctgttttagttgtttattattatttgctttttgacaacatgtaggttgtataatactgccctgtggatttcatttgcatttcccagataattattgagaataaccatcttccccaaagtttttcctccatttatgatacctattctgtgaaatgcccatttatatcttttcagcatttttggatcatgctgtttttctgtttttaatgataagtagcagttattaatatcccccagataataagtgcttgtttttttcttgtaagtgtaaaaattttcaccacaaattgttgtttatcttctaatttctattaaggtgtttttaatgaacagatggtgggactttaaaataattttaagattttcgtttaaggtttgtccttttctgtcttaagaaatattcccttactccaggataaaaaagatatcctcatattttattctcaacatttaaaaatgtaccttgaattttaaagcctataattcatacatatttaaattttgcctatgaattaaggtaagaatccaatttcactctgttttcgtaccgataaattattatgtcagcaccaaatatcaagtggctaatccactcagctgcaatctgcaatgtcacttctctcatacagaaaattctgtattttatattctattccatttatctacttgaaaatataatgccaatggcatactgtcttaataactctagttttgtaatgtctttatttatggtaggataaattactttgttattttctgggaatatcttggtcacttttgctcagtacttggtcacagagcgattagaattatcttattaagttatacacacactcacacacacactttcacatccctatagattttgattagaattgcactaaagatagattacattgattaaattaggagttggcagacgacaactcataggccaaacctggcctgctgcctctttaactctccttgtaaataaagttttatcggaacacagccacatcaatttctttacctattgtcaacagctgctttcaagttacaaaagaagtgtttagtaggtgtgaaagcaattctgtggactgcagataatatactatttactatcttgccttttataaagtttgctgacacttgatacatgtcatttggggggaataattacacttttataattttgaactttcacatccagaatataagtctcatttgttggttccacttaaatacttcaaaataaagatttatagttttcctccataaagggctttaatatattttgttagatttattcccaggtactttatgttttctaacaattgtaaattgaatcatttttaaattatgatttccaattttttattgctgttgaataaaaatgcaattttgcacaattatatgcaacaactgcattatacaaatcatgatataattatgcataatgattttattgctagagaatttgctacactgatttattaattgtaataagttatctatatactgcttgcattttgtaagttcacaatcatatcaactgtgattagtgattattctatttcttctcttccaatcaggaatcattatatctttttcttatcttagtacacaagctagcatcttcagaacaatatgaatgcaagtagcgatactaagcaagtctatatttctgctgtcttaaaaggaaatgctttaaattttcaatattaccttatgtgtgcgacaggtttttgtgcatatacctaacagattaaggacttcccttccagtgtccattttcaatgaatttttatcataaatgaatgtaaaaatatagcaaaacatgttctgtgtctgttaaaattatcattaatttttgccctttaatttattaatgaggagaatttggggtgtgtgtgtatgcgtatttttactgattttatttattttctctccactaggttttaaagtataggacttttatataacctttcagtaggtaccctaggcattttatcatcaatggttatcctaaaactgtctaaaatttatcaatattttaatgcacctcctcaaaactataaagaatgtggaatattttaatattaattaactcccattctcaattgtatgctgttgttaaaattaaaatactggataatttattgtgtcactgtattagtcctttctcacactgttataaagaactgcctcagactgggtaatttctgaagaaaagaggtttaattgactcaccacttcatagggctggggaggcctatggaaacttactaggaaggggaagaaaacacatctttcttcacatggtggcaggagagagaagtggcgagcaaaggggtaaagccccctgtaaaaccgtcagatctcacgagaactcactcactatcatgggaacagcatgggagtaaccgcaccaacgattcaattacctcccaccgggtcctttccacaacatgtggggattacgggaactacaattctagatgggatttggatggggacacacccaaaccatattagtcatcatcaattaaggcactgtcattgttttgacacagagtgtttgattatatttatccacaactagaacaatttatttactcataatttatttttgtattttctttcttcccaaagaccatctttcagaagacattatagtgagagcattttagtagtacatttagtttgcgttagtgtttaaagggtccttatattgccattatttctaaaagactatgtcactgtttggaaaagcttagttgaccagcattttactctcaatattttaaaaataccattatttgctatatctggcttccactgttaatgaggaacaagtaagcaccaatctgatttatctctgttctctatagtttttagaactttaaaaaaaattttatgttcttcaattttagtattacatgtccaagtggtaatgttcttttaattactaattttacttgaaattcactgcatttcttaaatttaacggttattggacttaattctaaaaaattatcagatactatgttctaaatattgcctttacactgtattctcacttcttttctccagttttctaacatcttttcaccaaatctatcttgttgagttactgcttgacttttcttgatattccgagctgcattctgggtaatgtgttcagatctatatttgaattctccaaaattttctatgtatcagtgtctaaatatatagttttcaaactgagaaacccagtggcactgattttctctgaggtgccacatttgtctcatagtggaaccaaagaatatttcagatgtttgagggaagcacagcaaagctgtatggtagagttaaaattgtgctgtgacttccttgagcgagttcacagtttcaacatctattttgctgaaaccatgcctttgcagtagttatggtcagaaagaaatgtcacacacaatcaatgtgaaacaagaaatgaggctggttatttttaatctgaatcaacagtttggaaagttgtacagtgcccaataggtggacatatctcattaataaattatggttatttaataaattatggtttattttttaatttaatttataaattaattttcaatggctaataatctcttatgacaaatactcattattttctgaacctagctatttaatagatagggtaactatttaagagatagaaattatttgtgatttttttggcctaaagttaccttaaaagaattactgagacactaaaagcactgtaaaatgagaaagtttgggaatatcttattgaatttattctctacctttagttttcaatcatgatttttttctcatctacatacatttaatttgtttttgtttttcaaaactgcttggccatttcatatagtctctttctcccctctcatattcactcattcttctattatttatttattcatttatttatattgcctctcaagcctactgccccacttttttgggtgtggttgagattactttactgcaaatcaaagtctttgaattatatcagtgatggttgtttgaagagtagcatgaagtacattcatccaaaacttactggttttattcatgccttgcttaaaagaacactaccatctccaatctctaaaataaattctcaacttcatttctttctttttcacacaaaatagagagtatgaatttggacacagctagcaaggagttgcttatagttagcatatcttaaatcatttttttcttccacctagcttcaagtttaagacatgccatttcgttactagtactctataaggagggtctttcttttcgtacatctaattcacccttcaaataatgacatagtctttggagatctggccttattctgtcttgggtggtctttaggtttgtcttcatgaccatgctgatattgaaaaacacttagagctttgtcaagatggcaaaggacacttcacttccccacaaaagagaatcaaaatagtgagtagataatcacactttgaatagaacatctaagagataacactggaattcagcaggtgacagaaaccacctgaggcaccagagagagatgccagtaattggtcaggagtccagacagtctctccagtgcagggaaaaggtaaagtgagagattcccagcagtccatatttctaccatagacttctataatcctagccataggagactccctcgaccccatgggtcccaagactggcatagggagctcactggagtccacgagatggcattgctccagagaggaagttcacactgggtcccacacatctcctgaggaccaggtagctgcagcatggtgccattttgagagcccagcccccaccagattgcttcctttcttagggcccaacaacccctgcatctccaaatctctggagccccactgatatgcccctgtgtccactgagagagctgcagttctgagagacactgactgaacccagtaaagttgcagggtccccagcactctagcctacacagtttcctgcatgccaaggaaagggcagtgcagtacactggggagagagccaaagcacacacttcccagagactgaaacccgcctgcctggggccactggcagtgatagcaaccctgctcccttcagcagaaggatttctgtgcacttgcatgtagcctgatgactggttctctttaccagccactacagccactgctcccaccagtgaccaaagtgtgcacaccccagagcctgaaacccatctgcctggggatgctaccacagattgcaacactgcctcaactcccagcagcaagactgccatgcgcaaacacgcatcctgaggacagcctttccctacccactgaaacaactgccaccactacccaagcaccctagctagagcctggggatagtcccgccctcacaccacttcctgtccgtatgcacaccaccagaggacatgagaacagtcctgtccgaccacccttcccagtgcctgagcatgctgcgtaggggctctgagattgttctgcaacatcatgtagtccagacacacacacacacacacacagacacacacacaaaacatcagatgtccttataacagcctaccatggctggcaagccttccagaggcctgaagtttgccccgccctctccatcacagcctacgcctatgtacaccatcaagagaatctaaaaataggcctgcttgctgacacggtgctcagtgccaaaacatgccaattgggcacctggggattgcccaggtgcatgtacacaccaccagagtcctaacaacaggctcagaaaaccagctgccagtgtccaaacatgccatgcagaagcctagggatcactccacaccatccaccactaccggcactgagcaatcctcctggggccctcaagatgggctcacccagcctgccaccaccaccactgttggcaaccactcatacatatcacctaggggtttagggtctgcccttcccaacactgacaacagcaagtgctgactggaagtccaagggttgtcctgccattgctactaccattgtcaacaccatgcatgctgctcagggacctgaggacatagcccactgttgccactccttacacctgagcaagccatctgtgggcttaagaattacccctcctggacttgctaacactggtgcccacatatgccaccgaagggcccaaggacaggcacacttggcatgatgctgccaccactggggactgatgactggcccacctggtgtcttgtccccagcaaaacctcatgatagcctccaaaacagccacagtctaagacactgaggaaataacaaaaccactgatgatatttatgctaaagatattatgtgaagattatactactgcacacatccaaaatcaaatctaaattgccctaccaagccaacaccataatttatctgcagaaaaaaattatttccctaaaaaagccaatccaaaaacttaaaaaaagtgactcttaaatctgatatgcagatatcaatgaaaggacacataaaaatgaaaaagcaaaaaagaaaaaaaaaagacgtctgcaaaacaacagaattattcttaagcaacagattccaaagaaaaataaatttagataaaacctaaaaaagaatttaaaatgatattaaagaagttcagtgaactacaagagaacacagaaaaacaatacggagaaatcaaaaaaaaatttaggatagatgagaaattcactaaagagattgatatcatttagaaaaacaaacagaaatattggatctgaagaattcaatacatgaaataataagacacaattgagagcttcaacaatacaatggatcaaacagaaaaaagaatttcagaacttgaagacaggtatattgaaataacctaataagaaaaaaatattttaaaaacatacagaaagcctgaataatgtatgggacatcatgaagtaaccaaatttctgaattttgagagtttcagaaagtaataaaaaaggcaaagacacagaaaacttatttgacaaaataatacctgaatattttctactctataaagagatttagactcctacatacaagaagattagagattccaaaataaagtagaaaagatcttctccagggaatatggaaattatactgtcaagtgtcaacaacaatgaaataattcaaaaacagcaaggaaaaagtcacacctaaaggaacctccatcaaataaagagcagatttctcagcagaaaccttgcaagccagaagaaaatgagatgatatattcaaagtgctgaaagaaaaaaaacctgtaagccaaggatactacacccagcaaagttattcttcataaatgaaggagaaatattttcctagatatgcaagaactgaaggaattcatcatcactagattggttctacaggaaatgctcaagagattattaaacctggaacaaaaggataaaatctaccaccatgaaaacacactggagtatataactcactggtagaagaaacaaacatatgagggagaaaaaagactatgttggcagtatggaaaactactaaatcataaagataaaaaataaaatacaaaggatatagaaaacaatcagaaaacaattgtattcaagctgcatgttagaccaaatgaacttaacagatattaacagaacactttattcaacagctacagaatacacattcttctcatcagcacatagaatattatccagaatagacaggcataaaacaagcctcaacaaatttaaatacctgacatcaaaatcatgtccggtattttctctaagcacaatgaaataaaactagaaatcaataacaagataaattttgcaaactgtacaaatacataaaaattaatcaacatgctcttgaaagaccacctcgttaataaagaagttaagaaataattttttaaaaaaagtcttcacactaattaaatggaaacacaacataccaaaacctatgggatacagcaaaagcagtgctaaaaggaaactctcatacactgttgttggaaatgtaaataagcataaccactatggagaatactatggatatttctttaaaaactagaaatagaattattatacaatctagcaatctccttaatgggtatttacccaaaggaaaggaaatacatataacaaaggaatacatgcatctcatgtttattgcagcagtatttacaatattgaaggtatggaatcaacctaagtgtccatcagtggataagtggataaagaaaaatgtggtatatttacacaatgaaatacagccataaaaaagaatgaaatcatgtcatttgcaccaacatggatggaactggtggttattcttctaagtgaaataagccagacacagaaagacaaatgttgaatgctctcactcatatgtgggagataaaaaagttgatctcatggatagagagtagaatgatagttactagaggctaggaaggatgtgtatgcagggtggcaggaggaagagatgaagggagattggttaatgggtacaaacataaaattaaacagaaggaataagttctaatgttcaatagtagagtagtgtgacaatagttaacaacaatgtattgtatatttcaaatagccagaagtgaggacttgaagtgttcccaacacatagaaataatacatgttcatgatgattatcctaactagcctgactcgaccattacacattctacgcatgtgacaaaatatcacatgtaccccataatacctacaaatatgatgtatcaattaaaaagtaaatttaaagctattaaaaggagaaacgactaacagaaattttttaaaaatcaaaacttaaggtaggtggaagtaggttaaatcttcaaaacactcaccaacctcactcctttggatttctgcttttactgttttgaacaatgaagactcccgtattttcataacttagaaatgcatttacaatatttttaactgtctttgcatgagagaatgttcattttattaattcacttgagtcaccatactgcaagctgaggaagttgcctcttccttgaatgaagaatgctaataatgtttagattctctttgattatcttcactttctaattgagagtggataaaattccctcccgggtttccaacatttccatatacattaccgctattcacatttcagagtctggtagatattcactcgatggcactgctggaccaaggctctctggccgccccaggaagaaatttcatgaaatagtgaaaattgcgtgttcacattggtatacgctctgaatttctaagctaatgataggaaatggtgaaagccaagcttcttcttgtctaaatcaaccaatgattatttcataattacgtcctatcttactctttcttcggttagcagaaacctttaaccctggcaaaacatagtaatgctgtactttcaatactatgacaattccattccctttttatttggggatgggggtctaccgtaaagacgttttaaaaagaattctaggctgggcgcggtggctcatgcctgtaatcccagcactttgggaggccaaggcaggcggatcacgaggtcaggagattgagaccattctggctaacgtggtaaaaccccgtctctactaaaaatacaaaaaaaattagccgggtgtggtggcgggcgcctgtagtcccagctactcgggaggctgaggcaggagaatggcgtgaacccaggaggcggagcttgcagtgagccgagatcgcgccaccgcactccagcctgggtgacaaagcgagactccatctcaaaaaaaaaaaaaaaaaaaaaaaaagaaaagaaaaaagaaaaagaattctatagagtacccataaaggataattaacctgactcaacatgaactcatggatctttaaatgccagttaattgggccaactgagacccgacactggtttcttaggacatttctcttttggccaagagtatgggtcttgtgaagagttggtgctgacaggaaatgttctggtgccatgcaacagaatataagatccggtctttggccaaaattccctccccatatactgagccagaacatgaaagagataacctcggacattttatttcctcccgttatcattgcaactggtttgtccacctaatgagacactacctggtgtagaattagggtccacaggaatatcctaaccccatatagatctgaggctgtgatacatcaattggcaaagaattttagcttcccccaaacagctgagcttaacttaatgtaaaacaattggggtgcattgaatacattttcttgttgtagacttatgtacagaaaataaccacgagagttattatttaatggacactttttccacattactactgaaaaataccatattccaccccatccccacctcctcatacaggataatgttcattaaaagggctgcatttttttaattatcaaaatacagatgaaacaagaaaaaaatatacttaaggctaggtttgaggaaaaaaaggacattggcaatataacgttttaaggtgttacctgtgtacagaaagatattcaaactgcataaaagccctgtctgtaagaaaaggccaaactatacaaatatattttaagcagattgagtcagaaacaatggcaaaaagctatactatagtgagaaagctgccatgtacctggaggacaggatttaccccacagtattaccatatttgtggtatggtgtaaaatcactgaagattagaacctcatgcccattttcagaggataaaactggggcccatagaggttatgtgttttggccaattttctcatcgcaggtaaacacactttaaagaacgattgtcctgcatccctgtgccagagactgagatgaccctggctataatgtctgtttggcttagttgtttatactgtttatggtgaatgatgaagatattagcttgttggcgaatcgtgggcctgctttttctaatgaattcaatttggtacaatgaaatgttcttttgggaaggaagccaatgctgtagcagctaaagttgggtatgaaataatgaaataatgggagaaattttgaaggatacgtatacaagtttccaagtgatatgtttgctggagaaggccaggcggaaaggcatgcaatggagtggattacactgtactgttctgcggtgagcagatatatggaaacctacccccaaaggctgagggagctaagaggctgaagaaagtggatgacagtttcagtttctcagaagcaaacgtgatgaagctggaggtcattatcttaagtgaaataattcagaagcagaaaataaaatatcacatgttctcacttataagggggagctaaacactaggtacttgtggacatatagaggggaatcacagactctgaggactccagaagggggaagaatgggcagaggatgagggtttaaaaattacctgttgggtacaatgttcactattcaggtgatgggtacactggaagctctaacttcaacattacacaatatatgcatattataagcctgcacatatactgttcaaatctataataaaaaattaataataataataataatagggacttatgaaaagaaacaatgtctcaggcggccatgagacagtggatccctgtacctccagaaaatattttttatatagaaagcttttagtgataaaaaaaaaaaaaaataggcagctggtcatgttgcagactttcttgcaaaatttgtgatgattgggtaggctagaaaggcattttttgaggggttatttatgctacagcactgtttaaagaccttgttgcagaaaaccttggtattcaggggtcaaacattagtcatcatggcagttttgcttcaaaatggcatcactcttgccatgcaacagtctgtttttctaaatgtatacagattccatttccaaactaaatcatcatttcaaggggatagtgtgtatccctaagtgctcaatacatacctaaacaaaaaggtatttattgaacacttagggaatacacacgctatccctttactctagttaatactgttagcgccctcatgaaccttacattctcatataattaatgcttaatttttaatagatttgaatgtaatttaataggcttgattatgatttctcatttggaaaaatgagataatacatctaaaatgttttcaagaaagctgagacagttgttttagtaagtaagaatatcaatttccaaatagctctacaaaacactgttttctatatttttttgtgctttcgcagtactagcacatggtaaacagtctcacttcttcctgagtggctaaaggaagaatactcagatacaaattcaatgaatttaaacaactaatttcacctcatattcttacacctatttgttttactccaaagttataatagaactctttctgtacctaagtgctttgacaggcattctatctaaatatttagactaacacacaaacagctgggctggaaggcttcttttcacagaactcaattccatttattttattctctataatgacatgatggaagaaagtgcatttcaaatgacagttataaagtagaggagaaacactacatatatttttactgggcatggagaagggataagagaaatgttccctacactactggctgcaacttccttttgtcattatatttcccttcaactttattgaggtatggttgtcagctaaaaattatgtgtatttcaagtgtaaaaattaatgacttgatatacattgtgaaatattcaatgcaatcaagtgaattaacatatcaatcttctcacatagttactgtgtatgtgtgggggcgagggttgctaagaaaactgaagatctatccttttagcaaatttcaagtataaaatacgatactgttaattacagttatactgttgtatattagatctccagaacttacttatcttgcataactgaaaaattttgaccaacattttcacattttcctctatccccagcccccagtaactactattttactctctatttttatgagttacgcatttttacatttcacatatagataatatcaggcatataaatcaggcaggattttttttctttgtctggcttattttacttaggataatgtactccactttcatctatattgtcataaatggcaggatttccttctttaagactgaataaaattccattgtgttatatataacacatgttttatttattcatccatctatagacatttatgttgtttccataatttggctattgtgaataatgattaaatgaacatgacaatgcaaatatctctgatatactgggctcacgcaatcctcccacctcagtttcccaagtagctgggactataggtgcataccaccatacccggctaatttttttttttttgttttgttttgttttttgtttgtttttagagatagggtttcaccatgttgccaaggctagtcttggacttctgggctcaagtggctcaagtgagacctcagcctcccaaagtgctgggattacaggcatgaaccactgcacctggtctatatgtcttcttcaatttctttcatcaatatgttgtagttctcaatataatgattttcttttatctccttgcttatttccaggtatcttgatttattttgtagccattgtaaatggaattattttcttatttttccaggtagtttgctattagtgtataaaactgctactaatttttgtatatagattttttatcagctttcctgaatttattcatttgttctaatagagttttttttttggtgaagactttcggttttttaaatataagattatgtcatttgcaatcaaggacaattgactcctcctttccaatatggatgccttttatttctttctcttgcataattgctctggctagtacttacagtactatgttgaataggagtggggtgaaactggggatccatgtattgttcctcatcatagagtaaaagctcctagcttttcctttttcagtatgatgttagctgtggttttgtcatatatggccttaattattttgaggtacataaacaagttctgtacctaatttgttggggatttttatcataaagtgatgttaaattttgtcaaatactttttctatttctattgaaatgataatatagtttttatattttatacacactacgaggtgtatcacatttattgatttgtgtatgttgaaccattcttgcatgattggaatgaacctcacttgattatagtaatgatgtttttagtgtgctgttggattcagtttgctagtattatgttgataatttttgcatatgtgtttatcagggatattgcctatagatttcttttttgttttattcttgcctagttttgaaatcgaggtaatgctagcattataaaataagccttggaagtatttccttctctttaattttgagaaataattttagaataattggtatttattcttgaaatgtatgctagaattcagcaaggaagccatcaggtcagatcctggggttttctttttgatagaagacttttataactccttttactttcccactcactgttgttttgttgacattttatatttcttcataattgaatctttcaattaggtctttaaatctttaatctttcaagaaggttctgtgtacccagtatttattcatttcttctatgttctcaaatttgtatagttgttcataataatctcctactatcctttgtatttctgtgatatcagttgtaatgtctcctttcacaactctgattttatttacttaggccttttatcttttgtccttaggtagcttagttaaaggtttgtcaattttatgtttcttttttagaaacaactttttgttctgttgatctttttaaaattgactttttagtctcttttgcttatttcttgtctgaactctattatttcctttcttctatcagttttcagtttagtttattttgtttttctagttccttgagttgcatggttagtttatgagaaatgtttcttctttgctgatgcagacacttagtgctctgaattttcctcttagaactgcttttgctgtgtcccataagtttttgtatgatgtttttattgtcatatgtctcaaataattttttaaattatcttttgatgtactcctgacttattggttgtttgggagcatgttgttaattttcatgtgtttataaggcttccaaagttgctcttgttgttgatctctagtttgattccttttgttataaaaagatacttgatatgatctctagcttcttcaatttgttaagacattgttttatgatctaacatatgatttatcccacagaagattccatttgcaattaaggagaatgtgtgttatgcagctgttgaatggaatatcctgtaaatgtcttttagattaatttggtctatggtttaattccaatgtttctttgttgatcttctgtctaaatgatctgaccattgttgaaaatagtgtattaagatgccctagtaatgttgtattgaagtctatctctccctttacatctattaatgtttatatattggatgctccaaagttgagtacatatacttgctatgtcctcttgttggactgattttttttatcattataaagtaacttttctgtcttttttagtgtttgacttaaagtttcttttatttgacataagtgtggctaatcctgctcacttttagtttctatttgcatggaatatgtttttctatcttttcactttcaatttatgtttttaaccatgagataaatctcataagcagcatacatatgagtcttgtttttgtttctttttaaaaatgcaattagccactctaaatctgttaatttaataatttaatccatttatatttaaggttattattgatagggaaagacttactcctgccattttgttaatcttttttggttgtttcatttattttctgttctttcttcctctctcgttatttacctctgtggcttggtggttttctatgctgctaagctttattttctttttctttctcacttgtatatctgctataatttatctgtttgtggttaccgtggggttaacataaacagtcttgtagttctagtagactgttttaagctgacatcaacgtcacttaggttgcataaaaatactctagactttttcccttctccccgatttgatttttggtgcccttaatttgtgtatttgtcttttatgtgttcttgtttcactaattttagctgttaaagtttttgagctttttggctttaaaacttcatgctagaaaattaaaatagtgacatagcatcattccaaccctgagttattttgagtatgattatagatatgcctatattgatgagttatatactttcacatatttttgtgatagtaattatcatccttttgtcttctgttttagcactcccttaagcatttcttccaagacctgcctagtgatgatgaattccctctgtttttgcttatcttggaaggtctttatctctcttttgtttctgaagagtagcttttccagatacagtattctctgctgagttcttttttctttcagcactttgagtatatcattttatttttttctagccctgaaagttttcttctgagaaatctctaatattctaatgagcattcccttatatgtgacttgatgttttttctcttccagcttttagaattctctttgtctttgacttttcacagttgaattatagtgtgcctcaagcaggatcttttggaggttgaatctgattgagggtcctcagtggtcaaggcagtgggtgtatatgcaatgatggtgagaactctttcagggaaacttatgggccaggaggagttccctctcagtgctgagatgtgccagcctggaaatggggtgatggacctttgagtttcctagatctagatgtccatatctctcccaagacttaggaagtatttagctattagtttgttaaaccagttttatttctataattcctgtttttctccctctggcattcctataatatgagcacttgttcacttcatagtgtctcagaattcccatagggtttttgtttgtttgtttgtttgttttgacagggtctggctctgtcactcaggtggcaccatcttggctcactgcagcctcaacctcaaccaagcacaaacaatcctcccaccttggcctcccaagtagctgggactacaggtgtgcgccaccacgtccggctaatttttctgttttgtgtagagatggggttttgtcatgttgcccaggctggtctcaaactcctgagtgcaagtgatctgcccacactggcctcccaaagtgctgagattacagatgtgagccactgtgcctggcatcaataggcttttaaaattcttctatatatcatttgaggtcaacaccagcaaagattatgggagttctcagtggccaaggttgtgggtgcgtgcagtggtggtgagggctgttggagtcctctgtggtgaaggctccatgagtccacttgttttcttttccctaacggcagaagttaatggctaatgggattccttttggcaccaggtttggaacgtgggcacacttgtgttggcagtggcaccagtggccaaggatcaggctcccattacagcagtggcacaagtgtgcaaggcacagctgctcacagaccagccacagagctagggtcaggagcatgggtatgcatgggtgggccatgcccaggtatgtttgtggcagcagtggcaggaggtcaaggatgctggtggctccagtctgggctggcacagcagtatccccttctcttgtttgggggccaaggggggtttgtggcagctgtaatgactattaaggttctcagcaataaaggctgctgtggtccccagtggcagcaactgtgtggctgatactgatagcccctgcacttcatgttcctagccatctttaaacacctgccccaaaagactcggcaagctggttgctcaccttgctctattattctccatgaggaaaactcatggttcagggaggtccctctcagtgatgagataagccagcctggaaatgggatgatgggagcaaactgaaactgttcttactacactttcagtatggttgttcccatttttctttgctccactgtgttccgttttttttcactggactcctgaacttttagagctacttgtgctcatgggtacatgtctaattatttgctgtggggcaaggtaaaggctgggatctcctactctgccatcttgctgatgtcactcctgaaattgttttttaaattccctgaacaatgccaacaataattttctcaatacttcaaggtccatttatgttttgcctcctcaataaagccttacctggttactttagtacttgcttatcttctaattcgttgagctctcttactagcataaaaacctgtgccaacaatttaattacttaattataaatgaaatcctgttgttttatatcctttttcattaaaactattttctattactctgtaacagggaccacaggattcaatgaaagttaactagatctgcctgattttcagtatcagtcagttattgccgtgatgagtctgtgtaaacaatcatctcaaaattctgggcttacaagagcaatcatttattctccctctccagcctgaaaattagcttggagttagctaggtggccctcagatttgacagctctgttccacaagtttatcatttttcttacaccagcaagctatctggggcttgatttcctccttgctacagcagaagcacaaggaggcaactccatgtgcacaggcacattttaagcccttgctggtatcatatctgctaatattccgttggtcacactaaatcacatgctcaagcctgaaattaagggtcaggtaaatctagtctgcctgtagagaaagaaactgcaaagtcacatgaaaaaggagttgattgtagaaggagtcgggaattagagccttgtaattcaagctactattttacctactagttatacaatcttggacacaacatctattctctctaaatttggtgaacactactctctttttagtgataaatttttcctgatcaggtcaagctaatgaaatgaagcatcttgcaccatgcctggcattttccttacaaattgcacccaatatgtaaagtacctgattagcactgcactggacttcctaatagagagcttcccagccaaagagtggattgcttaatgaagcatgaaataggagcagaaaatgttgaaccaagggctgggcagcatgagataaaaacctgaacctctgccacctctttgattcttttcatatggattctgagctccctctcatcctataaactgaacatcctatatgcttatttttcttgtttttgaagctagggcctaggcatataatgagattctgccagtcaatcccacccttacccataggtctttaacctgtagagctagtgctactaaaaataaaggcccacaaagagtactttgttcgacaactgtagctgctgtggcaatatctgaagcagcattaaaagtagtgtgagacttggatgtgaatgcagtaagtcaagtttcttggagtagcaataggaacaacaaagcatgcacccatgttaaggacataacaatagctatttcttccactagtacatggtttggttatcacccttggctgcaaagctttaagtgtggttctctggtgtttcgtaagctatccagcattatctttaaatttgtattttctacttaaatattatctagttaatatcatagcttgcatttatagagaaattagtaacaaaagtaggcaggtagcctaagtatatagtcaacagactggcaaagaaatttggagaataaattggtcatctggccttggctgtggctattagcagtgaaggtataattagtattcaaggatgggatcaggaatagcatggaaaaaagtcaatataatgctcacctatggtcactaaagataaaagcacagctttgggagatcagatggttacttccataaaataatataaaaacatttcaaagactgaacggtattgtgtctaatagtactggacttgagaaaagataccaacaaggtcacgtttcttaattttcacctcaaaacttaggctgaaaaccaggagttttctctcaactgatagaattactatcactttctatgaatttttaatctcctcttccttacatccaggtctaaaaattaaacaaaaagttggatcctggtggttgttaaattacagtgcccacctactttgtggtatcatcaggtcttttagagaattggtcaggaaagataagaactagaatagttctactaacctactcaaatgacagtgagtatttaaaatcttaggaaatatctgaaatctcctataagatcccaaatcttcactcccatttaagccgctctggctggcagaaacagctctttttcttttttttttttttttttagtagacagagtcttgctctgtcacccaggctggagttcagtggcacgatctcagctcactgcaacctccaccttctggattcaatcagttctcctgccgcagcctcccaagtagctaggattgcaggcatctgccaccacgcccggctaatttttttgtatttttagtagagacagggtttcatcatgttggccaggctggttttgaactcctgacctcaaatgatccgccctcctcagcctcccaaaatgctgggattataggtgtgagccaccgtgcctggccagaaacagctctttatttctctctgatagagctacttggacatattgaagaccctcacctgaggaagttctcttgcaaagagaaataatctcttctcacctcacttcatcatctctctagatttcaaataaagtaatattccaacatatttcaggggtcatttataaagccacgtatagaaagaaaggaatgaccacataacaaacaaagtgtaatattataccagtttccatcaaaaatgttaataaatatgtgtaagaattgatttcaataatgtgagataaaaaaagaaacaaaaacaattttgatctgcctaattttatcaacatgaatgaatgttccagagatgttgattcacacagttgccagtggtgctgacagtttggttggctgaaatctggatctgaatattaaagtagatttatcatatatgacttgctaggcctttccaaacagtgtccctcaagagagcccagaagactcttccttcactagaactttgaaacttccaatggtgaggaacagaaccacagtgatgatctttgtattcagagagctggtgaaaggtgctgctgttaaagataaattcccctgattccagtggggaatccaggatcttgagtaagtaacagaggccaaattgaggcacctgtcagaaccaaggtgaaatggttaccattccagttgctaggcagcacacccacagttctaagtaaatactctgacctacagagaactttgaatggtagctaatttgtcaggagagagaaagagcacactggtgaatataagacccttgacccacttgaaatcagatcatatcactcaattctttcctcttcctctgccttctcctcctccccctttctcttcttcttcctcctcttcctcctcctctttcgcttcttcctcctcccccttctctctctcctcctcctcctcctctttcttctctgaacaatgaagaggaaaacaaatgacagaataagaaattgggtactgtttacttctgtccgatcttttattttgatacatcagactggtatcaaagatccttattttcttcaggtttctatcagctcagactgaggcctcactctacttcattgccaaatatatttaaggacacagggaaggtttcctctctgtgcaagattctttaccttatttaagatatagacacatacaaattgggcaaggatctccaatttccttttttttttttgagtcagagtcttgcactgttgcctgggctggagtgcagtggcgccatcttggctcactgcaaccttcacctcccaggttcaagcgattctccttgcctcagccctcaagtagctgggattacaagtgcctgccaccatgcccaactaatttttttctttttctatttttagtagagatgtggtttcactatgttggccaggctggtctcgaactcctgactttgtgacccacccacctcagcctcccaaagtgctgggattacaggcgtgagccaccatgcctgccctccaatttccttttttaaaattaattttaggaaaagaggaagtcaaattgtccctgtttgcagatgacatgattgtatatctagaaaaccccattgtctcagcccaaaatctccttaagctgataagcaacttcagcaaagtctcaggatacaaaatcaatgtacaaaaatcacaagcattcttatacaccaataacagacaaacagagagccaaatcatgagtgaactcccattcacaattgcttcaaagagaataaaatacctaggaatccaacttacaagggatgtgaaggacctcttcaaggagaactacaaaccactgctcaaggaaataaaagaggatacaaacaaatggaagaacattccatgctcatgggtaggaagaatcaatatcgtgaaaatggccacactgcccaaggcaatttacagattcaatgccatccccatcaagctaccaatgcctttcttcacagaattggaaaaaactactttaaagttcatatggaaccaaaaaagagcccacatcgccaagtcaatcctaagccaaaagaacaaagctggaggcatcacactacctgacttcaaactatactacaaggctacagtaaccaaaacagcatggtactggtaccaaaacagagatatagatcaatggaacagaacagagccctcagaaataaagccgcatatctacaactatctgatatttgacaaacctgagaaaaacgagcaatggggaaaggattccctatttaataaatggtgctgggaaaactggctagccatatgtagaaagctgaaactggatcccttccttacaccttatacaaaaatcaagtcaagatggattaaagacttaaacgttagacccaaaaccataaaaaccctagaagaaaacctaggcattaccattcaggacataggcatgggcaagggcttcatgtccaaaacaccaaaagcaatggcaacaaaagacaaaattcacaaatgggatctaattaaactaaagagcttctgcacagcaaaagaaactaccatcagagtgaacaggcaacgtacaacatgggagaaaattttcgcaacctacttatctgacaaagggctaatatccagcatctacaatgaactcaaacaaatttacaagaaaaaaacaaacgaccccatcaaaaagtgggcgaaggacatgaacagacacttctcaaaagaagacatttatgcagccaaaaaacacatgagaaaatgctcatcatcactggccatcagagaaatgcaaatcaaaaccacaatgagataccatctcacaccagttagaatggcaatcattaaaaagtcaggaaacaacaggtgctggagaggatgtggagaaataggaacacttttacactgttggtgggactgtaaactagttcatccattgtggaagtcagtgtggcgattcctcagggatctagaactggaaataccatttgacccagccatcccattactgggtatatacccaaaggactataaatcatgctgctataaagacacatgcacacgtatgtttattgcggcattattcacaatagcaaagacttggaaccaacccaaatgtccaacaatgatagactggattaagaaaatgtggcacatatacaccatggaatactatgcagccataaaaaatgatgagttcatgtcctttgtagggacatggatgaaactggaaaacatcattctcagtaaactatcgcaagaacaaaaaaccaaacaccgcatattctcactcataggtgggaattgaacaatgagatcacatggacacaggaaggggaatatttcactctggggactgttgtggggtggggggagggggtagggatagcattgggagatatacctaatgctagatgacgagttagtgggtgcagtgcaccagcatggcacatctatacatatgtaactaacctgcacaatgtgcacatgtaccctaaaacttaaagtataaaaaaaaatgtataatacacctattacaaaaatcaatgtgattgatcctgaatgtaggacttttctgtttgaatttctggtttatctgaataatggttaaaattccaaatataaaacatctgaagacatttagcttataaaatcaaaaattctggccaggcgtggtggctcacacctgtaatcccagcactttgtgggactgaggcaagaggatcacttgagcccaggaatttgagtcctgggaaacaaagtgagaccctgtctctacaaaaaagaaaaatttataaaattagctgggcctactggtgcacgcctgtagtctcagctactcgggaggctgaggcagaggatcgcttgagctctggaggtcaaagttgcagtaagctatgtttgtgtcactgcacaacagcctcgatgactcagcaagaccctgtctccccaaaaataaaataataaaattaaaattcccatttctctatatgggagaactgtagaaatttgagagctgtgacacaatgtaacttctatggaggcaggaactgcctgtcttattcaagtcactatctagatcaagcttgtccaacctgtggcctctgtaaatcctctgtacaggcacaaaggatagacactgctgcctacatacaatgtagtagaaattttatgtatctattctatacttaagaatatatttctctggctaaaatatctagaaaataaaatacaatcatttcaatttctttatgaaatagtctgttgaactgcttcaaaaattcctctctctctttagtgttctaatacaacctttctgttttaagtagttttcattcatgtgcactattattactgtgtaaatgatcccaatatttatctcaaaatgtaaactaaggcaagcctccaaataaaaaataaaataaaataaaaaataaaataaaataaaattaattttaacaccaagttctttgaacactgcctaagacaaaataaatgctcaataaatatttttaagtgaatagatgtcttggaatatgctataattttacttcttacacacaatggatcttaaaaaaaaaaaaagatgatccagttaactgggagtgtgacagagataaacaacttacaagggagaaacacaggagtctgagaggtgctgcttttagctgggctattctacagcagtgtggtgtttacaaagatgcttaacctccatgagtctcatagatctctgactaaagcaagtggtcatagaagacatagctttggtttctttcagaatttgtattctgtgatacaggatatctctgcagaaagcttttactttgagcccaaatctgtgctctggaagtcctcttgtagtgttttcttccttctggagccatgtaaatgaatattaccctcttccaccagactaacaagtgtcgtttcttccaggaaaaaatgaatagtttctcagtacccatccagctctaggcctttccaaatatgttccataatctcaatctttaaaacagtttctaaatgtcaaaaatctcaatttttcaccatctgggttgcctccctgtggaagtcttctagcttgtgatctggcttctttgggtgaagtgttgcaaatctagcaactttcggatgctgcaaggtagattggtaagatagccctctcgttctggacaaagaacctcatcaatgcggacagttttaggcccagttcctggtgggcagagcctgagatggtagcatagggaagtaattatttgggcagttgttttcagaagaatgagagtaagggaaacaggttgtctaggagaaagagccaagcaaggatgctgtctcagctggagtccatgctgatcccataggaagtgctagacagtgaacagcaacatagacttgaaccccatttccaaaggcaaaggatcctgtaagtctcttgcacctgtaattccatcaatcattggctataggctaccagagaaaagtgttaccgttcaggcaatgtggctcctagcagccaaaggcaattctcagtcaatggggtcagctctgagctatttagcagccaacactcataggaactgggggatagaagcatcagcctaataaagcagatctgggcagggcaccaacagtgactctacagtgcctagcgtaacattggcttctatcagttgcatcattttttttatttttattggctttctcatctactataatcaataagtatttttccatacctactgctgttcaaggctacatacctcttactgcttttgtacagattagtttggtaacctaagtagaaaacattactttccccgctattatgtgtcacctcattacatttttcccttctattcctgtattattttggatgctgccttccaatactttctaaattatctgatttcatgtgtacctttgtttgagctctagttaaaaacagattgattttgtcagcaacatatagtgtctgttcagtcccacataccaatggcccaatatccagactgtcaagatcaaacccaatgaatgtctatcactgtaaagtcatcattttgctttcttggaaatataagtttgaggataaaaggcttcattggttcaaagaaaatagctctgtattcctcagatcaaaagactgttatagaaatgtttggatcctcctccatccccgatttagaatttgattttagagcatcgaatagctaaagacagcagggctcttttggctggctctttgttgatcagacttctgatcaacagcaaaatgaatcagtcctttcatgggaaccctgaaacctcaatgcctgagaggttaatgtggacagtgtctggttgcctgaggtccaagctgtactttctggccatgtgggtagttaatgcaatcaagaataagattaattaaattagaagtctgcttttattgctcagaaaaaaaaaggcaaattcaatactccttgactgcttggagatggaggtctgactctaatgtgatcactgctggataggcagagccagacggcatgtcatttagggaagcagtacaactccgacgattataggtgacctctatattgcatttagaacctttcagtaagcaatcaacataaccctaattcaccttgacaggttgctacccaggtctgagcctggccccttccgttttgctcctaaatacgctactcaggaacaagtcatcccctccaatttgcctagagccctgttgctctgtcatgcttaagaaatcttaagcacctgctcttttcatctccccagccctttcccagaaggacctacttaaggaattttcttccgagggagtatatgtgtgaaaatccttccccctggagtgttgaaggagaccaacctatacagaatctattaagaggaagacacaatatatgctccatcccattatcctttgaattagaccctgtttcttataaaacattgactttataaagagagatacatagttttgaatcttccctcagaatttactcattataagctcctgtacaattatttaacctctccacacctctaaattgagactcaagatacccatctttaaggttatctgagggttaaaaatagtgcaatgtagcattcattggaagtctgttaggttttttaattttttgttgtttttatcattaaccgaagttacagagactcagagagaccaggtgactatcttaaggatgtttgctactgttcctcccttacttttttccctttcgaaaacagcctctatggctaattagtaggaataagttttggagttctatagcactatagggtgactacagtgaacaataatatatagcttcaaatggctagaaggagaatatttagtgttctcaacacaaataaatgataaatgtttgaaatgatggatatgctaattaccctgatctgtcactatacattacatgtattgaaacatcactatgtagcccattattttgtacaattacggttagtcaattttttaatctaaaaaagcttcttataaaagtgaatgatatcagtcatttccacattagcatgaatttaattctatgggccactctgctcagattttaatatacattaagccagaggttcttagtttcagttgcacattggaattacctaatatactttatgcctgggcctccacttctaaggaagagtgaattataattagtctaggatgctgcttaggcagaagaatgtttaagatcttcacagtgactccaagattgagaaccacttgccttccaatcattgaaggaaattctttggtcaatgttaagaaatttcatggggggctgcaggacctctgacctctgaaagagtcagaatcttcacatatcaggcaggaaaccatcggggcctaccctaggagttactgctatttcaggacactgggaggagcttcatgaaaaggttgaatgatctgctaaaaagggagcaaaccccgcagattaaagattacaaagtgctcaatggctgtgcctcatgtgggtgtagcctggccccagtgtgcatttggcatggtgccctttggaatgcacagcttggccctggattgtcatttattttttctatgcctatctccccagctagactcagcttccctggcatttttaaacacccagttaaactttgtgaaatagatttgggacactctcccgaaatgattttcaaaagtgtttgattctaaccgactttagagtatgattgaggaaaatttttaagcaggcccaggaagaaacatttttaaacatatcaccagtttttacaggacaatgaggatcttttgcctttaaaatatcaacaaagagatatttaggtcttggtaaacaaaattaaacagcagctaatggatagatgattgtattattaattcttctgtcactttaaacgttttctagaacaacatagaaaacaaattaattaatttaaaattggcaaacaaggagaaagataaatgaattaataacactgatttctcattcccttacaatactgttttcagaatcattttaaaactgttcttcaaaacaaaacaagataaaataagacaaaacaaaagtgtttcttcttgtaacgttttcaggattcccacttgtctgatctagccctaggcagagtgtccctacactaagaagtcagagcttaacgtgtggatatattggatagcttgtttttagaaagagacattaaaaagtttcctttttcaaattttttaatctagtgcctgtcaaaaagttatttacttcagttaaatttaatcttacctactgcatagtaatcatggcattttaggacaaaaagagaccttagttttgtccatcaaatgcccttactttgcagatgaagagactgaaaaccagagatgcggaggaatttgcccagagctgcccgtgagctattgacagaatagggctctgaattaagcctcctcaagaccccattccttgcttgattcatatcacatattgtagattttcaagttatttgttttgaaaaaaaaggggaagggaggagcaggaatatattttacatcaagtatggacttgtgaactcctggttattaagtcatcttcttcaagataagcctctttgagaaagtcccttatttttagaagaccataattgtgcccatgccaaccccccctgggtggcatccatcttttctttccttttcttccttgttattgcatttgccttgagaatacagcacaaggccacaccaagaaaagatggagagagaaagaagctatggtgtaaaaaagagtaatgaggctgaccttttctgagtgagtgcagtgctgatctaattggtaagtctatgtcatgtctacctctctcaccctgtcttcatcattctcgttgagttcccactgtgtacatggccacatgtacttctgaggcaattcttccagcaactgaaataaatagcagcgaactcagccaaggaatctgcagaaattgatagcctcctagaagaagggttgggcagcaatgaggaatcagtgccgtccatcagcagtcactgggaacagggaaaatatttccccccgtgtcttaatcagtcagagggatgttgtctgcctgattgagagcgagcagaaaatgagtagttgtttcaattataatttgttatcagccactgatctaaacagagaaagttaagtcacagcagcttgaccacagatcaaggcaggtgttttgtttagccctgtgaagagatgctaattcagcaaagagagaaatgagagctttcttcgagatgctctgttattacatttaatataaaatttatagccttgcttacacagaggatctaggccactagaatggagatcagaaaaaggagcaccacattactttctgggtgtgggaagaggaagaagggaattttgtcctttccatcctgtattctgagctcattcctagcacctttgcctggcttccccacccatcgtgccagggctgctgcttctgggcagggcagccttccctgaccactcagtgcagggtgtccctggtcccagtcactcctatcacatcgtcctgttttcttgtctttgtggcattgatcatcatccagaatcatcttaatttctttacctgtttcccacttttagaaagtaaactgcacaataaaaagggaaccgatgttgcctttgtttttcctgtcacgtacagtggagcctagaagacagcagctatgcgataagaatttgcttaatgaaataattatttcatatgaggtattagcttaattctttccaaagagctatcatcggtttgggctgtagaagcaaagggaagagctttgcagagccaggcaggcctcagagctcaggtgatcaggatgttgagaatggaggggtaccatctgatttagactctggggtaaggagggtccaggagacactgaggagtgtgagagcagctcccaggcaactgagaccagaaaaacctggaaacaagcaaactcatgcttcatcttagaaggtttccagctttatttgtcctttgaaggcaagacaatatcactaggactcactagtgtaagacttgcctttgttgttcagtgaaattccctggctggaaagggagagaaatagagagagaagaagaaattctaatagcaggcccttgttaatcttcagtaggctttgcatagactgctactccctgggttcatggcctttcatgactggacactgagggggccacaagataaaagctaatcaaaaagagtataaagcattctgattggcatgtagcagtcaaggtgtactaagactaatactcaacaatggtgcaggcttttcaaattaacggcgacatttccccatatcttaaatgcaccctcatcaccaccattaaataacactaaacatttaaagtgttctcattaaactagggaagtcagattcttgggagggcatatgttgtgccaggagataatctaagtataaatatgtgtcaccttctcagcattggtgaaacgaggttgaaattttatatttttaaactcatgaaaagtttagttctaaagataggccatgagaatttcaagaaatgtgctggtggctgggctgtttaggatggagcctctggtctcaacaattcttgcctgagccccttcatagtcatttagaagcaagctacatccctcattacctttatcattttggcacctcttttctcttatggatttggaatgtctatatctataccaattacgaatgagatgttcaggggcaacaaatattttatgtgttcatctgaatttctcagcccttgccattaggatgcagacaaataagctttaatcaacagatcataagtagcagtgagggatgtcaatttatagctgaggcagtgaggagaagagagagcaatttctcagcaacttcttacccttctgccttcctcagtaaccttgggaattccatgttgagatggtggaaatgggacatgcaaggagcgtggatccctgagttacaaggtggaggagagctcccatcaacctgcctcagattcttcaagagccagaaatgcacttttatatataaaagtttagtaatggaccactgagattttatgatttttcggttgccacagtatggtctaagctatttttttccaatactgcacttgtaatcacatcaaattataggtaccagatgagggttataaatctttgttttctgactgatcatggaaatgttggatctcagtgtgtctgcagagacaagtttgtaaagttctgcttctgagacataggagactaggcaggtttattcaaatgccctggtaggagtttcagtagacccccaaagtaaactttaagttattctttgcttaatttttcaaactagctctgacaattcttaagtattcatttaaaattgtctgggtattaaagtccttgagctttaaataaaaagggtagtgagggactagaaatacaaaaaaaaaagagttaggccgagtatatcagaatcacagttgctgtttgagaggcctcatctcaacagagctgaaagagcatgcagagctttcctcataacaaggggacctaaatcatattcccattggcgagagttcccaatctattctattgagctgctgctatgcccaacaagaatattatattgcctctcaggttaaattgtattgcaggaggctggcaagaaactcagtgtgcaaataaagcttcagatgaacacacttgatagaaaataactgaaacggggtaaaggtcaggagttgtaagagagtagcagagctttggaaacacagggccctcaaatatttcaccatttgtcagaggcaataatgcagaattatacactttaggaaatgaacacagtgagctaatcttcctcttgagaagtgaattacttgctcatcttttgatgctgtattacctttctccaggcataggattcccttataagcaagggctatgtcttaaaaatttatctttgcagaaactcaataccagaagtatacttataacaacaatgactatttacagagcacttaatacaagtcagtctctactgtatgtataatatgtacattaattctcagaataagccatatagtaggggttatttttaacttcagtttatagacaaagaaactaggaacctcaagttagcaactttaagtaaattgcctgagggcacacatctaatgactaatgaaaatggatgtgaacccaggtagcctgactccagagtgtgaaacttaactattgtgccccagtgccactgttaagaatattaatgaatgagaaaagggaagaacatagtaggctggatgaatggatgaaagtagggattttaaaacgtgatcaaaaaagaatgaaagaaaggaggaaacgagtactggaaaaaggcatggaaggtagactagaaagcagcatggagggaggagttaaaggagggataaaaatggatgaaagaagggttggaaggagggctagaaggcatgatggatggatagatggatggatggatggatggatggatggatgaatagatgggtggatggaaagaaactaatataattggatggatatacataacaaatagaaatcttttttttcctctgccttaatggagtgtccaatattgctgctgagaagactcctgatacccacaaaataaagattcaaggcaaagatgatcggagctttctcgagaaccatgcagtttgattagcaacttttctctacccctttcctcatgaacattaaacctgtctgttatctactgcccaagattttttccttcaaggctaccctggactattttttaactggatattatctccataaaaggcattggagaccccagggtcctgactttcctgtgctcctcaaggatgcagaaaaaacaccttaaacacatcagttttggtagttacagaggaagattgtacagctctctgtacagaggcgctgttattaaagtttccttgtaaaaaaaaaaaaaaaagattctctgcgcttaacaccccggccttttgattctccattcactctctctccatcacctgctaccagctgctcaacaccctttaaaaaaaaaaagaaaaagaataattttgtgtggacatcttacacaagtactaagagattcatagataagaaggcaacagcatgagtgttgtttatcaagtaaaactgcttaggttggttaagttaaatattgctatgatttgaatgttccccccacaactcatgttgaaacttaatttccaatgtggcaatactgagaggtggggcctttaagaggtgattagatcatgagtgctttgcctccataatggattaactcatttatggattaatggattaatgagttaatggattagtgagttatccactaattgctctaatgggagtggaactggtggctttataagaagaggaagagaggcctgagctagcatcacaacccttggcatgtgatgtcctgcgctgtctctggatgctgcagagtctcccccagcaagaagcctttcaccagatgggccccctcaaccttggaattctcagccttcgtaactgtaagaaataaattctttttctgtacaaattgcccagttccaggtattatgttataagcaacagaaaatggactaaagataagtattaaaggacagagtatgtattgacaaatgtaatgattgaatggtctttcaaggatctgaagaggtactgcagctgtcagaatggaaccatttcccttcctcgctgtggcccattgcagaattttaggtgagatagtgaagtggggatgtcaacaaaagctaagctatcaatcaagttacactatgggtgactggaacttaatacccccagagaacactgataacatgtattgatagggaccccagggctatcccacctaaggcatgagggacctggtaaatttacatagcaaattccattcctcattaattgaaggctgctctggtgaaaatgggtgcctcactttccagcatgtcctgcatgctacatgggtgtcaagggaggttccagcagccagaaaaagacctcaggcaaggaagtgtaggtgctgggggtggtggtgggactggcatgccctgagtctataagagcacagccatatgggcagagcaatgcgtgtcccacagagggcttacccaacctcattcaggactgaatcaagaagaggaataattataattgttgcttccataatgtctccaaatcatttaatgtctgtagagtcttaacgcagcattgtgagccctatattattaaatccggcttaaatatgtgaagactcaattcttcaagaagttagttgccttccccaaagtcacaaaactacaaagtggtggcatcaaaactgtggctcaaatcttctgactttgcattcaggcctctttatactatatttatatggtattatacagacagtcccaaagttaggatggtttgacttatgatttttcaactttatgatggtgcaaaactgttatacatctattgtacttgaattttgatttttcctcttgttccaggctagcaatatggggtaggatactcactcctgatgctgggcagtggcagcaaaccacagctcccagtcagccatgtaattacaaagcaaacaaccagcactctacagcgcactgtgttgccagatgatttgcccaattacaggctaacgtgagtgttctgagcacatttaaagtaggctaagctaagctataatgtatggtgggttagatgttttcgatgcatttttgacttaggatattttttaatttatgatggctttatcaggacttgaccccatcataagtcaaggagcatctgtatgtatgctgtctgtgctaaactcaaatggaaggtacaccagagctttctgcccttcactaaaatctaaacatggaaaaggacggtgttattcccaactcccaagtatgtgctgtgattactcaaggttcatggaggatgtggccatgctgctccggatggttcaatctccatgatgattgctttgccacttcttagtactacatcctattacagctttgagttctttgggagaagtatttaatttcagtttatattttagatagaaaggaaagcaaaaaggctgtgaaattgagacatggggcacattacatatgaagctatttatcagtgtatttctgggagacattgggcagggtagacagagacaataaatggtaagtggaggttgggtactggagtcatgtaattgaatctgaagggagaagctgctacagtgtggcctccgttggtactcccactctctcttgaccacccagggccttctcacagagagtccatttgggcctcccatgccccttgcaaacactccttcaaacacatctgtctatttcctccacggaccttggtctgtgcctgataactggaataccaacccatgtgcatcacccactgcctaggaggtttcccttcccaagacattcattatccttacctgatactttctagagatataaaggcttccaccaaaggaggagatgagcaggacatgaggtgcaggagagagctctctggagctctcgggggtcaggaaaccttttggtacctcggcaatcaaataatctttcaggctatagctactattgtataaagctacataatctcctgtcccaaaattctcacaacattccaaatcttgggtaactgtgctttctctctttctgtatatatttaagagtgtatagacatgtatgtgtatatatatttatatacatgtatatatataatttcagtaacctttggggtagaagtggtgttttgtcacatgggtgaattatgcaatggtgaattctgagatttttgtgcatccatcatccaggtagggtacattgcacctgatgtgtcatttattttatccctggcctccctcccacactcccccctctgagtctgtaccgtccattatatcactctgtacgcttttttatatttgtagcttagctcccacttgtgagaacatactgtttttggttttccactcctatgttatttcacttagaataatggtctctagctgcatccaagttgctgcaaaagacattattttatcccttttagtggctgagtagtattccatggtgtatctagaacacattttcttcctcccctgattagttgatgggcacttaggttagttctgtaaattagtactgtgctattttcataaaagtgatttgttttatctctagtcatgggttaatatttatacttttgtaggtcttttgatggaaacaatcacacattagaacagattctttaaccagaccatatcttaatttatatttatagaaagtcatttcagatgcacaggtccacacacctggacattctcccctgctcatccttcactcttaactaaatgacccagctttcccgcagctcacatgtgactgaaaccatgagagtctggcagggtagaaggaaggcagacctgctgtaaatctggggtatgcactgccagaaggctaacgttacagtttatagatgttaaactggcaaaatgcacagtgtgtcttatgtacattcaacaatttctaactactgagagtaggatgggtgtgtaatccatatgtttcctcagtgccacaagtcatgaagaaaggaaaggaggaggggcggaggggtcggggggaagggagagaaagaggaagagaaagaaggtcagagagagaagagagtcctatttcctatggcagttctcacacaacagtttaatacagattcactccacctgccttctgcagcctgtttttgttttttgtttttgtttttgttttgttttaacttctcttatgttctctttctagaggtttgaccgaggaggaaagaatggcagttccacatcatgactgtcaactgagcatctcagctaagccatgtaacaggtgaactggaagtgtctttcctggtgggtgagccaggcttctaattttttagtttttatcctattgctgcgaacgagtctgtgactgttttcttttaggctacacctgctctgggtaatggagggaaattgcctgaaaaagaagttgcccgttgcaatttccagagtaacaatgggcttggggaaacaaaaatctgtttaaaaagatgtacttttcaattattttgtgccttgtgtactgctaatggtactgcttgtcaattgctattaatgaggataattctaataacagtcacattcatctgtgatgtttctcaaccaactgtgaataaacatgccgtaggtcttccctgtttctcttgatggcacagtcttggtggttcttgtaaatgtgaagctgcctctgggccaactcgacagaccagtgtactggggacaggtgctgaagccaggcaggaaggcagctgtcttcctcaaagaacaggcaccagcctagttgcaattctcttcccatcactagaggactcaggacatttgtgttcctttcagaacaggtgggggagaaaaggaagaagcagcagcaaggagttttccccagagaaagaggactggcagtgtccgcggcagggaggcagcacgctggcttggtttccatcttgctacaatcccaaatatatccatgagtagggagacagtagtgggtttccaggggagatggagaaatgatgctagttaatgtccaacacaggacattaaaaaatagaaatagtgcctctcccttattcactctgtcataaaattaccagaagctgaagtcgtgagaatggccggggagctagcggggagcatggatgtgaccatgcaggacccatggctggagccacctgggggcagccaggtatatcctggccacacaaactgcaaagcccactgctcttgtttctttcatttgaagtgtggaggggacgtgataaaaatggaaatgaccctttgttcaaccaagaggctgaccaaaccaccaactgaggctttgatttaaaacttgcctaactcagaatcaattgtggtaaactgaggcccattgagacagtagtttattagtgagaaaataaaaaataagggttttgtgcctatttttaattggcttaggattattaaatatcccacagcccctagggagggttggggttaaatttcatttactttcttactatcggcatttagcaattaatgtaaaggctcttggacattcactattaaagctatttggactgtacaaaaggtgatatgaatactgatttttaaacacatgtgctatatttgccattactgtagaattttttaggtgataaggatgaactacatcaccaggttgacattccaattcagtgggtatcatggagggactctgtgatgttccagaacctgcagctgctattattatctgatctgtctcgtgtgctacagtggatatttgcccaagctcatatacatttctctgcaaggtctattgaatgtcgctggtattcgtaacataataatcaaaatgaattgttgctctggtggtagaatgaatacacagggctgattaatccacttgcagaaaccctgaaatgaagatgaaaaacataataacagccacccttaacattaaccctgtggggctttttattaattggtccagatttaagcacagcttttaatcaacttggaggcttttaagtctacatcaccagaactgcttgttcatctccaagaacagtgaattaaatgttgaacaaatgtcagggaaggtccttttaagagagctcatcttaggacatttcatctacaaccacatcttataattaagcagtgcagccacgcacctgatcaagcctatatctggagacaatttgctttcaattttttatagaagaaggaagaagggatatctccatgctgtggatgagacactcctgaatctatacctgggtaattcaagccaaaacaagcactcttgtgagagagtggtgcggggaaagaaatcttacccagacgatggattcaaaacaccaggataataaactggccaataatgttgattttagcagaggtcttaacatgtttgagtttcaaggaaacctttgaaatgttctctccagaacagtgaaaatatgaacatatatatgtcctaaatgcaaatgaaatgcagggggttatggatccttgaatgtctaccctctgactgaaaggtaggagacccaagtcagatattttcataacaactagtggtgtttctttgataggcctctctacatctgttattattggtttgttgcctgtctttcatgttggcctataagctctctgaaggcagaggctatgtaatctgggttccaaacatgataccttgaggcatggtgccttggcatgctgcatatttttgagctgaaggagattgtgagggtttcagaaacaaaagatctctctgcccttcttccactctactttctcgtcctccttctcccccttttgggtataaaaactagaacccctttccccagagaaccaagccatccaacctaggaaggtcactgtctggcctcctccatgtgcccctgaagatcctcttgtgacaggtgtcctgttctttgtgggaaggaacgccatgcagagatacagacaagcatatgaacatatagaccttgctaaagtatcccacagtttattaccattagatcacaccccttgtgtccaatgacatttccccacaaccatcacttatttcatcagacttcatataaaaatacatcgttttccctgggtctttgggtcttcatttctgaagactcccatgtcacatcgaacattgttaagtaaatttgtcttttctcctgttactctgtcttttgttatggaagtgtcagccatgaaccttgcaatgggtaaataaaagatatcactttttctctcttacaatctttattactgaaccccagcatataatgcaaggcccaggacataggtagaagtcaacaaatatttatgaaattataaggaagaatatttctctattaaacatttaaatttcttgtctaagacaaaataatgctaagattaaaaaacagtagaaacaaatacccaaaattaagagaaaattgattattcccaggcctccaatacacatggttaactttcactgtagctgatttacctaatgataatgaactcatggaaagcagtgtttgtaattatatctgattcatttagttctctaaccagcagtgttcgaacctcagcatgcataagagctacctggagaggttgtgaaagcatagattgctggattttaccctcagatattgttattctggaggtctcgggcttgaaattctgcttttctagcaagctccagatgatgctgacactgctggcccaaggactgcactttgatgagcaaggttctaaattagcccatgaagcgattctaatgatctcattttacagataagaaatcttgagagtcacatcagccccaggtaacacaacagagctggaggtctgaagacagaccattagactatggtttctgtttgtgagttcttactgtatggtgcaactctacatgttggccagaaaagcatcttcttcacatctgtactttgtatttctcataaggttcttctttaggagataggactacaaagtaattaagctcttaatttgttttattagagaaacactgtagcagaaacacttatagcagcattaactcaattttaaagaaaaaaagtacatctctctaaatctctcaattttatctgaggtttctttttgcatttttgtcaaaagcatggtaatttttaaatgaatgtaatcatggtgaatgtagaatttgtgctcaattgtatttaacatattgagcatttttcattaggttgcatttttcattaggttgcattattttgatgatggttaaataaatatactaagatatgcatgtgcaactgagtgttatcagttcaatataattaccttgagaggctataggtctactccattgcaagggagttaatcaaacatatttaggatacatcttttgaaaaattgtctgatttaaaatctcattcttatgaaatactaaattcgaactcatttgtgagccgttttctcttccattagccctcttttatgcatgttttagagaactagttttctagaatagcagtgttattcagccttaatattggttttgatcataaagggattactcaagttacccataattattaagcttgcttggctctgaaggacttttgccatttccaaaatgcaaatgtatcttcagggggtcaatactggccactactgaggatgttttaaacatgccctaggggacatggagaagacgtacatgttgtggtgtggacggttccctactttatggtgtcactccaaaattgacctgtaaatccctataaaaatgtactttctttagagtggactagtgtaaacttcttttgaaaatataaatatatgtaaatgatatattctcatctatttatatgagcaattcagtagcctaggtctactggtctccataatgctacaataatgaaatcattttggtacaggggcatgcacaaaagcagggtgaatgaaagagaaaagggctcacaaatgagtttgaattcactatttcataagaatgagatttcaaatcattgtgaattgatagatattttagtttatggaattgcgacaatattagcttgatatttggatataatgtagaggatctttatctaaattgctgcactgaaaaataatgcagatgggtgggagtcgggtgagggttaaaaatgtacctactggataaaatgtatcctatttgggtgatgggtgcattaaaagcccagacttcatcactatgcaatataatgcctttgtactccttgaatctataaaaatataaaaataatttaaaaactcagatgcaacaaagatttgagcacttaaataaagctaaactgtaaaaccacccaaagaaaatatgaaagactgatgcatttgactatacaaaatgcaaagttcagtgtggcaacaatggcatattataaacaaaggtcaaaaaatgataaacttggaaaaaatattcttagcatgtaagaacaaagagtaatttcccttaatatataaagtatatacccaaaggattataaatcattctactttgaagacacatgcacacctatgtttattgcagcactgtttacaataacaaagacttggaacctacccaaatgcccatgaatgatagactggataaagaaaatgtggcacatatacaccgtggactactacacagccataaaaaaggatgagttcatgtcctttgcagggacatggatgaagctggaaaccatcattcccagcaaacgaacacaggaacagaaaaccaaatactgcatgttcttactcatagtgggagttgggcagtgaaaacacatggacacagggaggggaacaacacacattggagactgtcgggggtggggggctaggagagggatagcattaggacaaatacctaatgcatgcggggcttaaaacctagatgatgggttgataggtgcagcaaaccaccatggcgtatgtatacctatgtaacaaacctgcaggctctgtacatgtatcccagaacttaaagtaaaataatttttaaaagtactcttgcaaatcaataatataaggctagaaccacaacagaaaaatgtacaacagataagacaaaaaaacagaactacaaatagtctatagaccagcaaaaagctgttcaacatcagtcctattaagtagaggcacattaaaacaaaaatgagaatttttaacccaccaaattagaagccatactaatatttaataatttatagtattactaacaatttgttaagggaactaggcagtctcacatgctcttgatgagagtatgaatttctgcaacttcattggatatcaaagtaatgattaaaaatctaccacaaaataaaatgtgcatataccttaaaccagaaattttacttctaggaatttatcttacaaacacactcataaatgtgcactgaaacatatgtgtaaatatgctcattacaaaattgtctataatcttttaaaaaatgagaagcaatgtaaagtcgataagaaggggaatggctatataaattatgaaatatccattcaatagaatactagataattacaaagaatgaagtagagctttgtatgctgacaaggaaaaaatccccaaaagatatattttcaaattagaaaggaggaagaaagacaagacaaattgtaggctagcatataaagtttacatattatgcttctgtattttatgaggtgagtcttcaaggttaaaaaatagtatctaatgtttatttagttctccctatgagtaagtacatatctcatcagaatatcatgaaggtgaaatgaggtgatgtacgtaacaatccatgagctatgttccagttatctattgccatgtaacataacatttgagcacttaagtagtttaaaacaataaggattcattcattgctgtaattctgtctgttgtctgggtggtgtttctgatggccttacctgggctccctcatatgctgcattaagctggctaattggccagggtttgaacttatctgcaaagcctggaatggctggacctctctctccacatggcctttcacctgggctccttcccggggagtttctccatatcatggtggtctcaagacggcattccaaaagaaaagcctcggtgcacaagaacttagcaggcttctacttgcttcaaattcataagtttcatgacttataggagagtcaacttggaaatggaaagcaggaggtaagattttctgggagccattattgtataaaactatggcaagatttgtataatctcttcctttcttactaatgagaaaaccccaggcttagaaagaattaaatgacttgccaaaggtcacagtgctactaaggagcagagtggaaagttcacccttgatattttggctccagacaatgtgctcttgaccagtactctctgtagaatcccaccgttttccctaactcaaaccacctactttctctttgtatctttaattttaacttcagtttcctttgtgtaccattttaaaccagctgtttccaaagcatactccaacttctgctttctttcacgtttggttgatccgattaaacttctcttggagccttattgttgcattttgttgttgttgttgtttttgagacagagttctgctcttgttgccctggctggagtgcagtggcatgatcttgtctcactgcagcctctgcctcccgggttcaagcgattctcccgcctcagcttctcaagtagctgggattacaggattccaccaccacactcagctaatttttgtatttttagtagagatggggtttcaccatgttggccaggctggcctgaaactcctgacctcaaacgatccacccaccttggcctccaaaagtgctgggattacaggcgtgagccactgagcccggccattgtttgtttatatgctctgctaataatggtttggctctgtgtctccacccagatctcatcttgaattgtactcctataattcccatgtgttgtgggagggacccaatgggagataatttgaatcataggagcagtttcccccatactgttctcatggtagtgaataagtcccacaagatctgatggctttatcaggggtttccacttttgcatcttccttattttctcttgctgctgccatgtaagaagtgcctttcacctcccgccacgattctgaggcctccccagccacgtggaactttaaatctaattaagcctctttttctccccagcctctgatatgtttttatcagcagcgtaaaaacggactaatacacctgcctttcctcaactctctgcatttaactgcctcctggaatgtcttctcctttcataactgcctctcagaatcccagcaatacttcaaagtctattctgcatatcataccttcaactaagttttctaaccccaaggcaatactgattgttgctaatgatctaacactttatattaacactcttaacatacatcacaatatttaggtatgaaacttttatgtgactttcagccagcaagattgcaagctccttagatgtgagaggtctggaagaatacacctttgcatgcaccattttgctgacaataacatcttataaatgtcgagctttgactgaatgactgtgaagatgcctttttttctgatttgtagtccctctttaaatattctataacagtgatgtttagactccattgtgcataggaatcagttttcaatgaatggaattgagacaggttagttagatatatgaaaacttaattttgttgttctctatctaaattgggtaacttattaaaatgctagtagtttctgatttcacaggtctatcttagggtctaatattctgaatttttgacagacttctaagcatctaagtgatgccgatatttctcatccatggaccatactttgagtagtaatatcctataagacacaattcttggagcccaaccctaaaataatacagcaagagtactataaagcaagctattatctataaaacaaccaataaaatagttaaaatgagagtattcaaggtaaattcagtacaatttccaccaccaattacaatccaatgtttatggcctttgaaccctctgctaatcctggtttttgttttgacctgttagactgaagatgtaaaaaataaccactaatgtagacttgaatgtctcgctagtttatatttttcttagtttatctgagatgatttcaaagatgaatgtgtcctcataatatctttcttagtttccccagcttcactgtagtcctgtgttagtctagtctcctaactgcaaccaatatggtcacattacaatgcaaatatggttctctctctctgtctctctccttagttaaaaaccatttgtggataaagtctgaactctgtgtatggctggcattgccactgcttatctctccagtctttatattccataatccaattgtatcatatgtgatagtctaggtttatgttgaataaatattcacacatacctcctcaatgagggaagagtgtattcctccatctcatggctttgggcttagacacaatgacctgtcatgagaagaacatgtctgagtgattgctgtcagtaactgctgggtaatttcagcatggtccctaaaataaacacatggaataatgcctgactgcaatccacatttggacctggacctaaacctagaagaatgagagtctaaatctgagacatccttctgagctcattgtagatcagccaacctatgaatgaaagaataaatgcttatggtaggaaatcactgaactttcaggtgacttgttacacagcattcttacagctgactgatacatcaccagcctttcatttcctatcatttttctatctctatttctcctctgggattttatacagaccataatttctgcctgaaccactcttccccttaccactcctggtctggctatcttctctttatcttcatggtcccagctttgaagaaacttcttcctctgaaaagacttccttgctctgagatctagatagcatatcctcctatgtacctcagcatcatgatgtacttccctaatagtttttcttatccattataattgcataattaattttccttctctctcactcaactgtaaacttccagagagcaggaggtatatctgcttggttaattttggaatcccaatgcctacgacaggactgggacgttttagagctattgatgaaatcttgtggaaacacttcaattttgagtatctgcattttattttgtgaccttgtttatgtcctataatgcctttgctcttacctgaagttaaagccaggttgataactgttaatagtaatttaatattgataactactaattatagaaagcagaactatttggcattaaaaaaaaacaaacaagcaaataagaaaatgagcaaaaacaaggaatgcatttgaataataatataccatgtacctcatactttcacatgagctgggaaggaggagagctatcaactactctataaataagatagcagctggttgcattggagattctcatatttcatgactgttgagaggtgtgttttgagcaatgagattcatggagacacaagttaatttaactcctgtcaaaaggcgataggatgagaatgccagtttgtctaggaaaagagatggtgacccctttggaggagacagcaatggattaaaacatcccatattttgttgagagaatcttcacattagatgttaactttctcactggaacttgcatttttatatgattccatgatatttcaaggcatctaggacattttatctgctccaattttcgatctgctttttgtgctgaatttctttctctttaagtcccttgggagctgcagtcatagccatgaaacatgccatataatcaataaccaaccagccagccaaccaaccaaagaaataatatttgcctgtattttaaaaatatgtcatagttacaaaagacaaagaaaagctgagcagctatcacagattaagctctaaaaataaataacagctgaagatggtatatgatgttgagttaggttcaaacttttaaatttttttcatgaaagatattactgcgacaattattgaaagtggattatggactgcagattatgtggaagtgttaaatttaatgttaaatatcctcattttgataactgtttagttttatgtgagaaattgtctttgattttaggaaatatgtattaaagcatcaagaaataaaaaagcatgttgtcctcaacctaccatgtaatagttcagacaagaaaaatagactagtatagcaaaatggtaaaagtcaatgaatataggtaaagagtgcatgaaagtttttgtactattcttgtaagttttctgtgaacttgaaattattacacatatttttaaagttaaaaaggaacaaacttctagatttgtttgcaggtctacagggcccattttagtgagctttctgcttttggaattcactgaaccacatgggggcactaaatcctatgttcctatacaacatcaaactccaggggtcccatgccaacatccgcatgaacttcaacagtctcgtatctgctccactactagaatgtgctgattattctcagatagctggagcactgcagaacagctacagagcccagagtttatgctggaatcataaactagatccagataaagcagtggttccagagtttctgtatgatgggagttgggaggccacagtcggcattggatgaatgtttaggagtgccttgggagatagtgagagaataaggggataaacccctgaagaacacttactggtgctgctgctgattcatatattagaatagatttatttcttttgcccagatgttactgcaaggccaaaaacaaagagcaactacagcacaaggttcagagcaaggaacgagctgagactatctgaaacagagttagcttcgctgaagtcatttcataaaaagaaattaccagaaccaaacagtgctcctaaatgaacaataaaatatacaataacattagctctcattttctatatatgcaaacatccacgccaaataaaactcttagagctacatgaaagtctgttagtaagtaatttactttttggtgtaactgatccaaaaacttattttgctctcaactttaactgtttactttctctaggctgttctgaaaacaagcacacagacacataccaaaaaattaaaatcctttataacacttggcctgtaattttaaggatacattatacgttaaaataaaaagttttatgttgcctttataaaccattcattttacgttttccttcaaattgggtgatttatttactcatttaacatttatccaatacctactctagtagatatgtaagtgcaccaccatagccccttggccttccctggaaattgtctacggattcattaaacaattcccacttttagcatttgggactctcggcttaaaggctttctgtggctgcaagcatgggctgaagggatagaccagaaatgatgagaagttactgttccctgtagcaagcatcaaccaatgaggggtgggaacccgtggataagaacttcagcttttcactgcctcagtgaaataattctgaggtgtgtcccatgcaattttcccagtggggttatccagttgcacatgatggagacttgctcaacaccacaccctttactggttgtcttctcttccctctttcactttcccaatccctcacctctgtttcttgggttgcatctcaaagaaattacctgaaccaaagttattgtctctgtgtattcaaaccaagccaccttctctgcccaaaggactggtctatgcatgacagaaaaagtctctgccacaagacagaaaatgtttctcctctcctggagcttaccttcaagtggaagaagcaagctcaaccaagtaaacagttcagaaatagaagacattaggagtactgaggagtgaagatgtaatataggataataggagagaaaatgggtatggagtatctgctggaagaaatattgagcaaaactaggacatgaaaaaagggtaaactgaagatggccgaaaaggaacagctccggtctacagctcccagcgtgagcgatgcagaagatgggtgatttctgcatttccatctgagctttgaagacagcagtggttctcccagcatgcagctggagatctgagaacgggaagactgcctcctcaagtgggtccctgacccctgacccctgagcagcctaactgggaggcacaccccagtagggtcagactgacacctcacacggccgggtactactctgagacaaaacttccagaggaacgatcagacagcagcattcaccgttcatgaaaaaccactgttctgcagacgccactgctgatacccaggcaaacagggtctggagtggacctctagcaaactccaacagacctgcagctgagggtcctctctgttggaaggaaaactaacaaacagaaaggacatccacaccaaaaacacatctgtacatcaccatcatcaaagaccaaaagtagataaaaccacaaagatggggaaaaaacagagcagaaaaactggaaactctaaaaagcagagcacctctcctcctccaaaggatcgcagttcctcaccagcaatggaacaaagctggacagagaatgactttgacgagttgagagaagaaggcttcagatgatcaaactacgagatacaggaggaaattcaaaccaaaggcaaagaagttaaaaactttgaaaaaaatttagatgaatggataactagaataaccaatacagagaagtgcttaaaggagctgatggagctgaaagccaaggctcgagaactacgtgaagaatgcagaagcctcaggagctgatgagatcaactggaagaaaggttatcagcaatggaagatgaaatgaatgaaatgaagcgagaagggaagtttagagaaaaaagaataaaaagaaatgaacaaaggctccaagaaatatgggactatgtgaaaagaccaaatctatgtctgattggtgtacctgaaagtgacggggagaatggaaccaagttggaaaacactctgcaggatattatccaggagaacttccccaatctagcaaggcaggccaacattcagattcaggaaatacagagaacgccacaaagatactcctcgagaagagcaactccaagacacataattgtcagattcaccaaagttgaaatgaaggaaaaaatgttaagggcagccagagagaaaggtcgggttacccacaaagggaagcccatcagactaacagcggatctctcggcagaaactctacgagccagaagagagtgggggccaatattcaacattcttaaagaaaaaaattttcaacccagaatttcatatccagccaaactaagcttcataagtgaaggagaaataaaatactttacagacaagcaaatgctgagagattttgtcaccaccaggcctgccctaaaagacctcctgaaggaagcactaaacatggaaaggaacaaccggtaccagccgctgcaaaatcataccaaaatgtaaagaccatcgagactaggaagaaactgcatcaactaacgagcaaaataaccagctaacatcataatgacaggatcaaattcacacataacaatattaactttaaatgtaaatggactaaatgctccaattaaaagacacagactggcaagttggataaagagtcaagacccatcagtgtgctgtattcaggaaacccatctcacgtgcagagacacacataggctcaaaataaaaggatggaggaagatctaccaagcaaatggaaaacaaaaaaaggcaggggttgcaatcctagtctctgataaaacagactttaagccaacaaagatcaaaagagacaaagaaggccattacttaatggtaaagggatcaattcaacaagaagagctaactatcctaaatatatatgcacccaatacaggagcacccagattcataaagcaagtcctgagtgacctacaaagagacttagactcccacacattaataatgggagactttaacaccccactgtcaacattagacacatcaacgagacagtaagtcaacaaggatacccaggaattgaactcagctctgcaccaagcagacctaatagacatctacacaactctccaccccaaatcaacagaatatacatttttttcagcaccacaccacacctattccaaaattgaccacatacttggaagtaaagctctcctcagccaatgtaaaagaacagaaattataacaaactatctctcagaccacagtgcaatcaaactagaactcagaattaagaaactcactcaaaactgctcaactacatggaaactgaacaacgtgctcctgagtgactactgggtacataacgaaatgaaggcagaaataaagatgctctttgaaaccaacgagaacacagacacaacatcccagaatctctgggacacattcaaaacagtgtgtagagggaaatttgtagcactacatgcccacaagagaaagcaggaaagatccaaaattgacaccctaacatcacaattcaaagaactagaaaagcaagagcaaacacattcaaaagctagcagaaggcaagaaataactaaaatcagagcagaactgaagtaaatagagacacaaaaaaaccttcaaaaaattaatgaatccaggagctggttttttgaaaggatcaacaaaatcgatagactgctagtaagaccaataaagaaaacaagagagattaatcaaatagacgcaataaaaaatgataaaggggatatcaccaccaatcccacagaaaaacaaactaccatcagagaatactacaaacacctctacgcaaataaactagaaaatctagaagaaatggataaattcctcaacacatacactctcccaagactaaaccaggaagaagttgaatctctgaatagaccaataacaggatctgaaattgtggcaataatcaatagcttaccaaccaaaaagagtccaggaccagatggattcacagccgaattctaccagaggtacaaggaggagctggtaccattccttctgaaactattccaatcaatagaaaaagagggaatcctccctaactcattttatgagaccaaaaaagagaattttagaccaatatccttgatgaacattgatgcaaaaatcctcaataaaatactggcaaaccgaatccagcagcacatcaaaaagcttatccaccatgatcaagtgggcttcatccctgggatgcaaggctggttcaatatacacaaatcaataaatgtaatccagcatataaacagagccaaagacagaaaccacatgattatctcaatagatgcagaaaaggtctttgacaaaattcaacaacccttcatgctaaaaactctcaataaattaggtactgatgggacatatctcaaaataataagagctatctatgacaaacccacagccaatatcatactgaatgggcaaaaactggaagcattccctttgaaaactggcacaagacagggatgccctctctcaccactcctattcaacatagtgttggaagttctggccagggcaattaggcaggagaaggaaataaagggtattcaattaggaaaagaggaagtcaaattgtccctgtttgcagatgacatgattgtgtatctagaaaaccccatagtctcagcccaaaatctccttaagctgataagcaacttcagcaaagtctcaggatacaaaatcaatgtacgaaaatcacaagcattcttatacaccaataacagacaaacagagagccaaatcatgagtgaactcccattcacaattgcttcaaagagaataaaatacctaggaatccaccttacaagggacgtgaaggacctcttcaaggagaactacaaaccactgctcaatgaaataaaagaggatacaaagaaatggaagaacattccatgctcatgggtaggaagaatcaatatcgtgaaaatggccatactgctcaaggtaacttatagattcaatgccatccccatcaagctaccaatgcctttcttcacagaattggaaaaaactactttaaagttcatatggaaccaaaaaacagcctgcatcgccaagtcaatcctaagccaaaagaacaaagctggaggcatcacactacctgacttcaaactatactacaaggctacagtaaccaaaacagcatggtactggtaccaaaacagagatatagatcaatggaacggaacagagccctcagaaataatgccgcatatctacaactatctgatctttgacaaacctgagaaaaacgagcaatggggaaaggattccctatttaataaatggtgctgggaaaactggctaggcatatgtagaaagctgaaactggatcccttccttacgctttatacaaaaatcaattcaagatgattaaagacttaaacgttagacctaaaaccataaaaaccctagaagaaaacctaggcattaccattcaggacataggcatggacaaggacttcatgtctaaaacactaaaagcaatggcaacgaaagccaaaattgacaaatgggatctaattaaactaaagagcttctgcacagcaaaagaaactaccatcagagtgaacaggcaacccacaaaatgggagaaaattttcacaacctactcatctgacaaagggctaatatccagcatctacaatgaactcaaacaaatttacaagaaaaaaacaaccccatcaaaaagtgggcaaaggacatgaacagacacttctcaaaagaagacatttatgcagccaaaaaacacatggaaaaatgctcaccatcactggccatcagagaaatgcaaatcaaaaccacaatgagatatcatctcacaccagttagaatggcaatcattaaaaagtcaggaaacaacaggtgctggagaggatgtggagaaataggaacacttttacactgttggtgggactgtaaactagttcaaccattgtgaaagtcagtgtggcgattcctcagggatctagaactagaaataccatttgacccagccatcccattactgggtatatacccaaaggactataaatcatgctgctataaagacatatgcacacgtatgtttattgcggcactattcacaatagcaaagacttggaaccaacccaaatgtccaacaatgatagactggattaagaaaatgtggcacatatacaccatggaatactatgcagccataaaaaatgaggagttcatgtcctttgtagggacatggatgaaattggaaatcatcattctcagtaaactatcgcaagatcaaaaaaccaaacacggcatattctcaccatgggtggcaattgaacaatgagaacacatggacacaggaaggggaacatcacactctggggactgttgtggggtggggggaggggggaggaatagcattgggagatatatctaatgctagatgaagagttagtgggtgcagcgcaccagcatgtcacatgtatacaatgtaactaacctgcacattgtgcacgtgtaccctaaaacttaaagtataataaaaaaaaaaagggtaaactttgctgagatctttaaaaaagagatcaggtaaagaacccaataaagtcagactcttgggtcagaaactaggtagggcattccaaggggaagtttggctggagaatagaaaaaagaaagaaaatcatcacatgagcttagaaacactggaaccactgatatacaaaagtatttttatcataaacaattatatttatattttggttggtttgtattgtcctacaaacagttagtacaatagtaactaacttggaatatatattcgttcattcaacaaacattttctaaacatttactatgtacagatactattttaggaatgtagaaaacattctagagagcagtaaaccattaaaaaccttcccttttattttaaatcactgttattaaacacagcaccttaaatcatcttttcctatcccattgcaattttggctcaatgtcataaccattgtaatcaatttccatttttaaaacttaatcaaatctggtttgatactttataatctgtgtgaagatctcttcttcccttaactcttctagatttgaatgtttccagtagaaaagagaaacagcaagtgcctcctaatgataagatacagtaattattattgttgtggggatgtgactctcttcttgctctcagcagatctgtttccatcttatatagctggtcttccagtaggtatctgtggttttcctgggataatgctcaggtttgccctggctcttctgtgggaagctcccttaaagagagacagcggagtcttcatttagccctggcactggtctatccatgcttccaactcctttttatggtaaagattccactactttactagatagaatccctgtaactcatgcatctccattaacctccatgatcctacacatggagccaccggaacagttaaagttcttgttctcactctctaagggttacaaaaacaacagtactacacaatacttcccaagcctgatgcatgaaccactttagagggaattctatctttataaatcattgaactaaaagaggacactggactctatgttcatgtacaatgccaaactcttgtgaacctatgtcaagaacttccatgaactctgacaataaactctatttcaatcagaaattttctgcaggttctaacccttggtacaaatccatcctgagatgatatcaggttcccttttttatagcatagcagcccaagactttataaatcttcccttaaagggtcccacaacttggctttagaacttaggaaatcacacctttcctcttggttattataggagaattgtagtagatgctgtaagtgccatggcctcatccccttagctgccaccattccagtacacacgtacagcatcctaccaaagacacctgactttcacctaaaggctttctttcaacctcatatggggcagatcagaaatgttgagatgctgacaccattgagaacagccctcagaaagagaggataggagtgggtgtttaaatacccccactttcacacccctcacgtaggacaacttggtggcatattctatgctctgtcctggagttccccagaaagatagggactcaactgttttcagtggtagcctgttccataacacacttagttgagtgttcttttctttcctttctctctctacctcctccgttgggatttcctgggattttcctgggatctatcccaggaaatcacatcccaaataaaccacttacatttgaaatctacttcaagatggactcccccccaaaaaacaatggggcaccacattttatgtgtccttctctgctttgagaattagctataattttgtctcattaggagaagtttcacccaatgctagatgtattcaactacatttgtattcacatttacatttatatgtaaataaataaatatctgacaagtatctggttacttagatcaggatgaaacatcttgtggttcttcaatctcagggttttcatgaatagtacccagtagcttttcatcacattgttttgttctgtaacagggcatctgaacttcatgctagtgcctttttgagctgaagattttatagctctgtgaaagttctggagctcccagcacacgggggttgaatatcagagtgtcttttttcagtaacactctgaatttaaaagagtggaaaagacttcaggtgagaagggaaataaatgttgtcctcccagcttaaatgactcagcaaaaatagccactgaagactacagcctaggttcatggaccagtgggcagaagatttttgacacatttctgataccattactggctaagcaaatactttgtgtttttcagttgtctctgttagaggacacatccttagtcctttaataccatggggtaagtcaatgtatcagtgacatgcatggcaccaatttaaagactagtttaagggattatatcaggaaacaaagaaacacatactagaatcttattttgcaacaaccatttggctcataagaacatcaatagcaaagattgggctgtgctatccatattttcaaccttgaaagggaattcagaagatgatcagtgccagttctgccttcacctgaaaagacaaagccaaaaacatccttgatttaattggataacccccaagatctgggatatctgctcatctcaagatcaaagagtctagctttattctacatcataaactttattctcacaaattgattacctttttcttgccggtggagagccttggcagatgatcagagtttctgactctcaaagctagtcatattcacggttgtttttatagccaatctcgtggacactaagcactttccataggaactttacctgcccctatgaggcagaacatggtgtatatcagagtaggggtccatgagccaaaatcttttcttatttcagaatcatagccacaatcctaccattttggtcagattggatttcatctttaatacttattctagtggcattttccaatattcatctcctccatagctaataaccttgttttgggattatgtgtttaaccaaaacagccaaacaactttgaccctgctaaggggatagaaaaacaaaaggtaagagtaactgtaaaccagatgacatatcagttgtatttccctttgtttttgagtggcctatttgctagatgaaagctaagatcaaaatatctcatatacacctggacacttaagtcagatgaaaatatcttgtaaattatatgccccaggggcttaaaaaacaccccttccggttcccagaaacagtgaagcttgaagtttttgatgaggacacagatgaaccagaagacagaaaccccagactcaattatcgatcagatggcaatatatttagggaaacactagggaaaaggaaactaatgtcctagtcatctgtcccgattatgaaggctgtgatataaaatcctcgcactaaccttgacctacacctttagcccacttctgacataggactagaacccctcattcaaggtgtcctcaaaactccatggtcacaatttcccttgccattggtaccagaatcctgtctcacctcaagtctccaagtccctgattgaaaaataagaggtgcaagtttactacgtgtttttcactgagcgtcccattgttcctgtcgtaaaggacccatcgatatcaagtcactgccttcctgctctcagctgatcacattctctgccatggtggcagctcctcagcaggaaatgttgaggtccagagaacacacaggcagagccctgtttctaatgttgccatcccggttgtgcatttctcaggacccagtgtaggcaagagtgtcctagagcccagaaataatcaggctggaaatgctcctaggcttggagaagactcattcaggggcaaagctgtaactcctatcgacacagggcagggcccaggtaactgtgacataactgtcttagcctatctccttccatgaagaaatagagaactagaggaggctcaaacagggctctttaggtagaaatagtgagctcattaccaagaatgtgtggcagtcattaaatgatatagaataatgcagtgtctatcgataaagcccaaggaaaaagactctcttgttgacaacctgaagggcaggttaccactttagtactttggtagatgctgctataggggtatccaagttacctttgtttgtcctttgtcaaagaatgagccctgtccagattgtgaagcttctatcagttggaaactccagaacagtattaaaacaatgaacaaactgcctcagcccccatgttaaactgatgttaaactgattgaaggcactacatggggggaactcagaggaaaatatctcagatttgcaaacagtctggattagagaatgccccaaaaagatgtcccagaacttaacccactgacatccattgatttgagtttgggaagagctcagaaggggaaaaacaaacaaacaaacaaaaacagaattaaactcatctttctgtggggtaattctttctgtttgctaaataaattaacggagtaaataaaaacatagagctaccaattcaccttagttaaaggaataacttaggttcaagtactttaaaaaccctaattatgacatgttgctaatcattcttatttgttttgcataaggaattgcctacaaatcaatacttccatccctaattcactttattttacgcacttgaagctgctttaaactgcctttccatagccacttgtccataagtcagggttttattaaaatagccagtgcccctctgaaggtttaaaactcagaggggcactggctattttaggatttacctcccagccacactaaccggaatgttcacgtcttgagaagtataaaatctactgaaaagtgggccactgcttccctttctaaccagcaatttcaggtgagtccctctccccactgtgttctgtgttgtcatgacagaacacaaacaaacaaaaatcacctgcaaccgtttctgggggagacacctcagtgtttcaggattagagttttaggaaataaaaatcaagttcactaaatatttccttcagtgtataaagtctgccatcaaccattccgaaagcaaagaagcaatatttgaggtatcgtggaatgtaaatactaactggcttgtgaaggagctttttaccgcatgcagagtttgtaaaggggcttgcaatgcactgctatcactgtttggatcgcctgtgcaagattgcaactaataactatgattacattcaaaaaacccttgtcagaaaatgacatgaatgcatatcccatgacttgacattattgcattctacactctgctcctgggagtcacttttttaaggtctgtcggtgagaaaatctctatttctcaatagaagcccacattttactaaatgaatacattttctttgatcaaatatctatgttgttttccagatagacactgtaatttgtttttaaagtgggtaaacattctgcagcctttctcattgcctctattcttttattatggtcatccctccaaaataaaccttaaaaattacaacctgcaaagccagcattgttttcatagagtctcctaattttccccattgctaaggagcatgccattttggttaactgctgataatagtacattgtgtttaagatttgataaaagcattcacataaattacagatcaagagaggtgtgtttctctatctgtaaaagaggtgggttagactagagtaagctttaagatcgctttcaagtcttacagtatgaaagtggtctttaggactacaaagagcacatctgtcctccaatcttcatgcagattcttgctaatctaacccaacatggaggagtaatgcttcaaaagaatttgtttccacaacctttctcagaaaccctcgccgattaccttatcaaggagaccactttctttttgaagtggagtattctatgcataatttcaggctaaatgactttttgttgggttattaaagtgggagatggaaaacaaacggtactgcttagaaatctctcttagagatgaaaaacactaaagttcaaaaagatcgagtgattttctcaagttcacacaactgggttgggatttttggctacacattcgctcacttcttaatgaatcatgcactgagtccctatcccatggcaggccctgtacatagtggtaggaatctcggggatgtaaaaggcaagaccttgttcttcatggattgtggtgtaggtgaaggaacttacactaacaagataatgaacaattgtcatagagagtgacaaatgtttcaaaagcttattgaccccaaggtgcagcggtgcacattagagggcacctaagacagcctacaggggtcagaaaagatgtctcagagggactcacacctgagctgagttgtgaaggaagagcaggatagaatgagccaaagataaagactccaggcaaaagcaaatgagcctgagggaaactggagccaaggcaagagcagcagaaaagagcaaagccagccggtggtcaaggtgggctactgtgtatgcagaatgaggaagctggccaagtagacatgtttcagatgatgaacatcctgtatactagatgcattggaacttttttcatcccctcaactccaccaagcctctgtccactcttggtacctctctccaagtagacatatttcagatcatgaacatcctgtgtactagatgcattggaaattttttcatcccctcaactccacccagcctctgtccacacttggtacctctctctattcatatctctggcctcaaggagggtatttggcattagtaaataaattccagagatactaaagtcagattttctaagactgggtgaatgactccatggaagaagtgaaaaagaggaagttgtaatagggagacctcttcggagcagatgcaagaagataagatgtctctgcttccccaccagcttcaattctctctttgaaatggctaagcaactcccctgtgggttagctgaggataatagagaagacaacaatagctaatgtgcaggcattttagcaggagctaaatgagaaacacagacaccaaacagcctaattaataagggagctatgaatataatgtccaatgaagtattcccaggaaaggccattggggcccaccctgttgagtgcagtgggaggagagacaagcaggcaaagctagtattcattcccctacaccaggggatggccaacgttgtcctagactgtaagggtgataatacctgtaacatctattcccagggtagtgggaaaattaggggtgccattgttcaaattatgagtgccattgttcaaattaggagtgccattgttcaatgggaagtgttttgtttgcttatttatatttgtttagtgagatgatgggcaaggcgtggtggctgatacctgtaatctcagcactttggggaggtagattgcttgaggccaggatttggagaccagtcagggcaacatagaaagaccccatctctacaaaaactgaaaatatttagctgtgcagggtggtgcatgcctgcggtccagctactcaggaggctgaggtgagaggattgcttgagcccaggagtttgggggaaaagtgagctatgatcatgccactgtgctccaacctgggcaacaagcaagatcctgtctctaaaaaaatttaaaaattttaaagtgagatgatggacaccagctacagaagtcaggtcttccacacttcttcttaattgcattatgggaatctccccaaactacctcactacaccattagtaaaaataggtcctggaaaaatctttacaagagacatgtcttcatcttaaatgaatgaggactgtgagtgacagaacgtttactcagcagagtgacaggaaaggtagtgtgcatttgcccacgaagttatagctacagcatagacttctggtggcaaagcaagcactgacatcctaggggtggtttttgcagagttcatgcaaatgaaacatgagcagtgactgttgtagggctttgaatcaacaaagtgatatgccagtaattaggtttcaactgactcagatcccattctaggcattaattgggagaaaatatgcagattgctagttaagaatagaacagttatagttccatagtcattttctttctgttcatcaatttgtttgatttcttgtgtggcaaacacttgctcttccctgtatatgtttagctatttcagatgttttcttttttttaaaaaaaacagccatttaataattaaattagagatgtctttaaagcacaattgtatgtccctatggcctatgggagattttgttttgaatattggtagcttctgggatgacagtgtttcagagaaccccagaatgggaggaggaaaacctgtgtcttccacctctgtgtgtgctggggtgcggggggaggaggcgacactgaggcaaggctgaaattcttgaaataaatatgtactaaagggtcagggtataatgagccctacagtttacccacatttagataaaattatctgcccagtcaggttgcagaaatttctgtccaccctcatattgcacacactccttttgttcacatttatagttctgattaactttacttaataggcttttctcttgtaactttctggcacttgctcctcccaaggccttttctcctgactatgattctatgacttgatttagtttgactcctggctggatcagggtctattaatgtgtctggctctgtgttaagggatacacatacagcaggtgcatgtcaagttggtgaatggtacagagaaaatgtaggaataaaaactgttcatgagttcaaagtttaaaccaacgatcataaaagtcaattgattttaggtaacatgaaggagagaaacagactgtcatagagaataaagtgaagtaatgggcagaagagagcagcggttctcaaacctaagcatgcattggaaacatccggagtacttactaagacccaggtcctgggcctaccctcagatatggggtgggccaggaatttgccttcctacaagtttcagtatcatggagcaacctctgagtagagctaaattagagagcacatccttcacaaaagcattcaaattacacaacaaaaagtttttaaaaaatgcagctctggagcacacacacaaacacatatactcacacaaacatagtaactgcaagacagattagattcctgtttataaattctgatacaaacaaaattaggcaggagagttatgaagaactaggcagtgagcctaaaacaaatcagagttaatttggaactgcttcttttaccattttctttgttgttcagggaagcctcattgagagatttaagagtagttgctattatactaggcctgtatcaaagagcaggtgaggactaggacaagaaatattatgaaaccctcagtaatcaccccatttttttttacgaagatgaaatcgagccgagccaagccaaccattcaccagacgaagaggtaaacaggaaaaatcttcctaaggcaaatttcaggtatttagagaaaaagagatatctttacctggaaattagaggataaaagaccaattctggtggaatcaccttagtcaggaaatacattttgatttcttaaagccatagttgccatatctaatgcatattatgtaccatgtactatattaagaacattacttcatttcatcctcacaataatcaaatagtgcagatattactattattttcactttacaatggagaaaactgaggcataaggaggtaaagaaatttgtctaaatgcaaaaatctatcacgtgacatagctggaattaatatcttggtttgctttctactactttaatattgtaagagattgcattatactgttccctctccttatatgctcatgattttgagatctcctggaagcatttcttcccccacctccctctctatctatcagcaacatagcaatccccacaaaacatgctgagcaacaggttctattgactgtatcctgagagaaaatctacaagctagtgaaagcttgcctagttaaagcaagtatataggcaattgccccaggagtgcagatagtgctatcatgagacctggtacaggttttaagtctctgatatttcctgaaaacatataggggctgtagttttgagatataactcttattcacatccataaatattggtttcactaaaaatctttcttggtatactcaaagcatcattattccctttaggatatagttgaccacaagtaacattaaacttgaccaaacgtggcttaaaatgagaagtcagccagttgaaaacaagatgcctggaggtgaatggtctagggcaggttcagccacttggtgatgccacccaggacccaggctgtttctctcaatgctcccagcccattaccttctctttttttttgagacggagtttcacttgtgtcgcccaggctggagtgcaatggcatgatttcggctcactgcaacctccgcctcccgggttcaaaagattctcctgcctcagcctcacatgtagctgggattgcaggcctgagccaccacgcccagctaatttttgtattttttagtagacacagggtttcaccatgttggtcaggctggtctcaaactcctgatctcagatgatccacccgccttggcctcccaaagtgctgggattacagatgtgagccactgcgcccagccccattcccttcactttctgggctatctctgcatccttatcatggcaggccagatagaaaggaagaactgagttggcataaagtgactgtctttccatctagggtgagaatctttcctggatgccctcttctacccatagttgcagtggaggacagaaaagaagaagaggatagacaagattggttccaatcaatcaagctttatttcctaggtttgggcatgtgcttcatctgggaaaaataaaattgcatcatgttacaaagatgaagaagggtgtggctgtggagagaagggccaccgtgtctaccatagccactgtttcccaagtatcaagtccttttgcacataatgtctctggttgaggaatgtagggaatagattaaataggacagtgtttgccttctaagagttcacgatttaatgcaaaacaaaatggcactgtagaaatctaacatcacaaggtaaagttaaaaacaccagataaaacaaaaaccttacatatattgtagaaaaacaatttctcattccatcttctcagatttcagatttcattatgcagtaaatgctaattcctgagaaggcttttatttgtcagatgaatatctgatagcagaatcagaatgtgcgtgggcaggccacacatttgcatctgttttaatttttgagagttgctctactaaagagaaaaggaacttaattttattctgggtctgaaaattatcatgagtcactcacaataaatgttgcaccattacatattaataataatttttaaagtaggcctgcaggctgggtctttattggattctctttcagtgctattcagttattgagaatgttggcttaaaataaaaggaaattcacgagtgatttcttaggtgccacatagattgtctgtgatttggagcactggggtttaatttgcaatctacactatttctgttatactcctgaccgcttctctgcttatggggcttgtgatgaccttcctaggcatttctattctgcagtattttaaataatttctaaaattcatgactaagtaaaaacaatttttcaaacctgtctcttttgcctcctaaaaagagtccatttcatttacactcctagccattcaacttgcattgcttattaaaacaattcacttaaagtccttaagcatggtgcctggccgagagtctgagtaagtgctaaataaatgctagttatcagcagcaataactttaagatttcaactatctccaaactttacccatgtactcaaatgtttaagtgtgtagaccctgaagccagactacatggagcattatcctgtctctactacctaccgagaacttggagacttttttgtctctttacacttcaggcttcccctctgtaaaacagggttaacaaaagcactatcttaattttttctttttaaatattatgtggaaaaaatatatgtaatgctactattactgtaatgttgctactactgaaatgactactaatactcctacttctactaatattattccacatcactcttactgttattggacatgtttccatcttctctacgaacttgtattcaccctgtagtccaaaattctttaaaggttgtataacaaattatccccagaacttagtggtgtaaagcaaaatttcaacatttgcatggctcatctctgctcagccaggtctggaccctgaattcggagactcaaaggctggcgccaactgtcagctggggcagccacaggccgggggctggaattatccaggctcagtcacttatatgtctgacacctggacaaggaagactcaaacaattgagggctggaacagatggagctctctgggcatctctttccaaatatatggtctccctgcatcatggtcccttcacaaagacagcttcaagtagctggacactttacctgacaacttaggggccccaaggtgtgtgtcctcagagacagaatgaagatggcagaggcattatatttctttttatgtccttgcttcagaactcattcagcctcaattctcctatagacacaaggccaccagttttaaggggagaaagtgtggaccccacatcttgatggaggagtgtcaacgcttcattgtaaaaagagtaaatgaggtgggagacataagtgtgggcttaggtgtgaacagctctaaaaaatagaattggtcatgcccagtcaaatctgctctttaagacaaagagcaacagcttgttccttttgcagatcttgattatctcacatagtacattactctgggaaaatgaaggtccttcctttaattggtctctgagcctgtgttttctggagtgtgtcccatggggcctggggcctgagctgacagcaccaaagaggttccatgttggttggttgacggccatttttttctgcctaatgaattcagatgcttacttttctgtttggaagacacatccttaaaaagagcccttattgtccccactaattggattttagcactaggtcttaggcttctagttttctgggaatttttttctaccagctaagattttcttaaaatcattcctcaccctacagatatcttcttatcccaagacttcttagcctccttgtaagaggaaccattgacttatttgcaccacctcatcagcctaactttttgttacttttcttattaagaccctccacaattgcttgtctttccttcactataatgcctcatctggtttcttcctttacattttcaagttatttgccactttcaagccagattcaaggttctcatcttccccaggaagttattcattcattctcgtattcatcagtactaacaaaatacacacacacacacacacacacactctctctctctctctcatacacacaaacgtatatagtacttatatagtcattttatgagatatttttaaataactgagatgctgtaccataaatggagtttagttgcctgccgtatgcttaccctcccaagcacgaccataggattcttgatttttaatgtggctttggtgttctcatgctgcaagcacctcagattgcattccatattgtgtatcaaatgtatttactgccaggtgaattatatgcctgacaaagaggctgggttatgcatgtcagtgttaaggaaaataaaggccttcatcagctgatataaatattttaccagaagaggaaatcagaacttagtctagtagtaaatgtttaggaaaaaatgtagtttggaaatatcactaaaaaaaaaaaaagaactgctgtcatgtctcagagaacttgaatatggtttatctcctctctatattggcctctgccgtgtgtgttagaccatggctaaaggtgtgtattttatctcttggctttggagagaaaactgaggagatagtcataaggaagaggaggcatgatggatcttgaaaacagttgtgaagagttggttgcctgatgaaactgtgtgtctgtccttgaatgtggccatgccacctgccttagagcactggaatcactgcctcccatcattatgtggctgggcccctagttgtacatgatgctttggggaaagagtcagtgtactttcatgaaggtagatggggtggctttcttaacacataagcatggcaaggctgcactgtatttcccagaagtccctttctctatgtttctggctaggatgaaccacaacagatgtgtttgcagatttggagggaggtgatgaggcattggccatttgcttttactcttggaaggttggggaacaagcttttgtcatgcacatgccttgtcattaatctgttggttcaccttgctgttgtgaggcaggagctggggcctgcaacttctctgtcttccccacattcttcctacagcttccctgactcctggaccaagtgtgtgtttagtgcaggatagagctcctatttctgcaggacaaacacattaccaagatcagaggcaacaagactgacatagtttccactttatccttgtgggtttccatttgtctttaatttcttccattttacatccatcttctctttcatacatatataatcctagtggtcttgcttctcttattaaaccttgactgagacagtgggttttaagcattatttattataaaatggaaaacatatcagatttcaagactaatgtgttctttctaggtaaagaaaaagtaaacatttgggatttgggtcaaatgttgtgggatccagacttccaggtcataggtcactcttccaaaataatccaactctatcttctgcatgtggcaagaaaacaaaaacaaaaaacaaaacaaggaaagacaagcagtttacaaaactatgatcatactctttacatttgatcttcaggacatgaaactacctatttttcactgggatttttttttccctaaagaagtctactgttcacagtcatatcaaaatgatgatgtctttccaaaccctgtcctattccttcccgtatcaaaatgtatatcaaagaggtcccatctatttatttatttttgaaattggcttttgaataaaaagttttatctcagtttaaaaataatttttctgcactgcaccccaagcagagaaatgaatcttagcagagaaagttttgctaagctggtagtcctaggattagagtcatctatgtgatagacatgttcaattctatgttgttcccactatgaaaaggcattgcagaaaaacttaataataactccactagttttccaaatttatttatcattttctgtaacaccaaagacaataaggcaaaagcaaacttctcctatcaccttcttattttaaggcttatggctggggaaatattcatggtggcaccctcttgaatctccttatgtgtgttaaattattatatagtctgacttacacagattccaagaaaactttttttctatcatgttgacaaatcactattttcaatgtgtatcatggtagtgcactgtactgtatgccataaatttgctatttggagtccactggttatatagtgtggaacagtggatggaattgggtttttcacttatttgtgcatagggcaggggactgctactagacagggactgttcaggatccctcacagaatcttgattttggaaggaattaggaagagctcatctatcctcccatgcccctgttgattggcagcttacaatcctagattatgaggagatggctatgctgatatggaatcaactagaagccaaacattggtgtacctggaatccaagcaataaacaactttatttcccaagatacccaaatgagatataaaatgttgcagtttcattagtttctgaggccagcaggcactttggagagatcacaagcttcaccactggcctgcctgcctgacctgagctcagattacagtcccacaactacttggtgacagttctgttgggcaagaagttttacttctaagcctccattcattcatttgtaaaactgagataataatgcctatctttcaggtttgtggtaaagatcaaagaacatatttgaaaaatcacttgacccaaggttcacacatcctaagttggtggtggtgtagaatttagtcaaactaatcaaagaattagcttgccgtgataggcgtttggtgaaatggcttgcagactggaggggaaagaataacatagagcagctggaagaagcttctgttagttataaacaagaatcaatatcataaagtgacaatatataggtgactattcacttcattccatatgatgtgtatttggtctatcctgccccttgtcatgttaaatttatctctctgaaccattaagcatagacaaacattatgccaagcatctattatttcctgaggaaatgacttacttttgattatgtcaatgaagagtaaaccagacatctatctcagatgggggaagtttctttgccttattttgacacacgagtgagcctctcttgtgtgtacagtagtgctggtcatctgcaggggactggaatggaatttggatgctctcaaatccctagggtttgaggtgaatattttatacccctcaactaagtccattacttttaaacagtgagggaaggatttcaaacattctgacattatttttaaattcatgacacagaaagaaggaaggtgtgttttttaatagtcatgaacgagttttgctttgtagagattattgcttgttctactgcttggtaaatcagggaagtgtttcatattgactattgggtcctgtatgtgcatgtctggtttagctttaaatttactattcttagagtctaatgggacagaatcattcactttttcattattttattcttgagaaccttgccatctgatttgtgatcttaatccctgctccatctcttgctagaagcatagttgacactgactggtgttcagttctgtaacttccttaacttcaataaccttcacctccactaatctttgaccacacatttccatgaaaatatcaacaacctgaagttgatctacctcaaaagtcctaatctttgaccacaaatttaaagcttattctccccggccctttctgcatcagttacttgttctcattattctgctggcccttggtacctcccaactttctgcttgtcctcctaggacatcattgtgcatcactgtagccattttctttatcctatctttttaattctgtcaacccttatcgcaaaattccaagcctagatccattcgaacttgcatcctcatccttcctgccagggtataatagaataccactgaggaaagttaaccagtgatgagcattcatgctactcagcagggtgctcactgatatccaagaataccatttcatgctcttggtcaatgttcttctactcaaacattcacagtctcctccatgaagtttgcctctccatctaaactgtctgctgcttaaggacaagaagcataattatatctacaaagatgctgcctaatcttcccagcaccagtgcctagcacagtgtctggcatgctttagacagtcaacaaatatctgacaaataaagaaagttttactacaatcagaaaccactcagaggatgattcctcatgtcccacaaataaagcaaagaaattagttataattatttttccaattcccataccatgatgatcatccccatcccttataacaaaacttgtgtccactttcctaatactttaatttgaacaccttaaaagctttccctcattagtcacttattttcacttctaaattttcatctatctgttctctgaaatctccttcctttcagtgtaatcacacactcaactttctccatctaaagaaactcttttattcctttaccctctcccctttccttttggtcttttggttttttgtttttgtttttgcagaggagctgctccattttctgttagattaaacctgctgcaatatagcatatgtatccaatattccactaatgttgtttcacaaagattataaatgatctagtttgcaaaccaaaaatgtatctttttagttcttaggttactagacctcttcgcccttggttatcctccatttccaaatattccttgtcagtttcctttgtggggtggttttactctctttaattaaaccctggtgtcttccaaatatccaccctcagaacttttgttctcctacagcctataccctcatcctgagtaatttcatctataaattaaacttaagtgataactttctggcaaatcaacagcacggatttctttccttcctatagagattttaaactcaacaaatccaaaaatgaactattcatgtcccctacccacaacctgccctaccatcccactgcccaagtcagaaacatgaaagtcacccagacaccttcctcactttcaacatttatagcgatctacttagttcaatcaatgcaaactcttaatacctcccaactcaagtatttcccaaggtgtgctctcattaaatgagcttgaaaatgctttgtattttattggcctcttgggatatcaaaggatctgagaatttctgcagtaaacaaggtttttaatttcattcaacttggcaatttcaaacttataaccaccattcccattgctaattcctgtagaaatttcacacaattaaatgtccccagaaacatagtttgggaactattgttctttgtccccctttcccattacagctgtgtagtggatacccttggtaccccattcagatcctctagggtcttttaaccaactttttttcaccattgcccagctgtgctcttgccattaaaagtttatacctttgaccttcagaggactgaccttgggcctgtaaccagcctcacctgtagagagagtcagaagtgactcagagtttacatctcccttaggatggattctagcccatggctagctggtatgggatacagggtgaggagtaattaatgctacagagtgaggagtaattattgctacagagttcatcctaggaccaggctgagggtgatgctatttctgaactcacacccttgcttgactttttcgccttctctgttttgcttttcatactccctcacacattctgctgaaagtactgccttcataaaccacttacacacaaatccttggctcagggtctgcttcccaacgagcagcagcacaataccttatttcaggctctcaccatctgtgatgtagactcccgccatatgccattacatggcctccctgcttctagacttaccctctccatttcttccaggataaaatccttatcatggcatccctaggttatccaccatctaacccagacctgattcttcagctccagcgtctcttgttcttcctagcaagtgcaacctctaaccacaccaaagaaattgccgtgtcccaaatatacaaaggtccatcatggcatcataatattgcacaagctgtttctctcaccagagctggtctcccccagcttttctggtaggcaaattcatattcttccttcaaaagtagtgtcaatatcccagtgagaattttcttaattccacctcttttgcagtccagccctctctttttcacttctaatagtattttttacattgtagtttaactgtttgttactttgtctgattttccttctaatgttgattcctccaatgttacctgtttctaaagatagggaatgtttctcaatcattttggcccacatagggtcccattatgtacagaagatgctcagtaaatatccattacaacctagaaatcacatgcccagtcatcatgactcctgtggttaggacattcttgttataggcattgtgatcaaactaacctgagagaaaaattttattgcttagttgtccctgtctcccacattgtggattgtgaagtatctaaatcaaatcacatacaccgacaacaccccaaaatgaaatattttatgtgtcaagttgccatccgtaagcttgcttgccaaacttatttacagactttaacaagattaaataccaactcaattttttgtggaataattagatactacactcttaggcacttgtcttacagagttgaacagttaaagcacatttacaaaaggactctgttgaagaagaatgttggtagttcttattatctctatgaggggtggatgagatcacctgggatttcagcactgataagtgcacagtgacactagctcatgacctcacagtaccttcctttgtgggccttccaatagctctatgaagataaatgctacgtgtccatgttcctgggaggcagttgctttaaaaagcacaattagtagtttccttgctgccacctttcctcaatccccactacttgggtgactttgctgataggcctgtaactggtagcttctgataaatcttataagcctaaaataggaaactggcactatctattgttgctttagccttgtctatgacctacacactagaaatgtcatctgtttcttgtctggaacagaatcttccaggaagtcttccctcctggagacttcctgggtgtctacggactgttgactaaatttaacacacacacacacacacacacacacacacacacacacacgcccctcacctattcttcaactatattaccagaaaatatcacaaaaaatgtcatttcagagaccccaatgtgatataatttatttttgagaaagtaaataaatgctggctcattcaggttatatgtaatacgtccagatgaccaaccctaaacaatttttttgaagtagtgaaatgtggcttccattattcccagtccctattatcttcacttacttaaaaataatctttttacttaatcttctatgtcagttagctagtgccgtataacaaactatgcccagaatgtagtggcttaaaacaacaaccatttattatttctcatgaacctatgagttggctgggcagttctgctgatctgagttgactattcctgcgtcagttgagttatggattgaccaggagactttgttgatcttggctgggttctttgatgtatctggggcctcagttgggacaacttggttgactttgctctgctccccatgtcatatatgccagcaggccagcctggcatgttctcatgatgaagatggaagagcagaagagagaacagaagtgtgtaagggctcttgacgcccaggctccgaacttgctgccaatcacttccaccacattctatcagctgaagctattcacaagacagcccggatgcaagaggtggaaaaagagatctattctcctcatgggaagaattgcacagtcacattgcagagtatagacacagaaatgggtaaaaagttggagtcatttttgaaaatagtctctcctccagctttgcaggtgttctataacaccaagattttcagtctacatccttcttgtctttaaaacttgtgattgggaaattatctgagacatatattcacaaagagatgaatgatatttaaagctaaatgtactatctgtctatatgtaaaataatgccgaataattggcctcagcccccaaaacacccaccacatagactctaaaataaagaatatcaggtataaggaagtagttggaaatagcattctgcatggtaaggaaagaaaatgtgatatatacacaccatggaatactatgtagccataaaaagaacaaagtcatgtctttttcaagaatatggatggagctggagggtattatctgtagcaaattaaggaaggaacagaaaaccaaatgctgcatgttctcacttataagcgagagctaaatgatgagaacttatgaacacaaggaagaaaacaatagacactggagtatacttgaaggtggagaatggaaggagggtgaggtgcagaaaagataattattgggtactgggcttaatagctgggtgattaaatgatctgtacaaaaaaaccctgtgacatgcgtttacctatgtaacaaaccttctcatatatccccaaacctaaaataaaagttaaaaaattaaaattaaaaaaagaaatattttcattaaaattctttacataatgacaattataataataacaaatgacacaatggtaacaataatatccatgtgcatttattgagcatttactgtgtattagcctttgtggcaaaagctttgacttttttttaatctcatttatttgaggaggatactattgctataatacccatttgatagatgagaatactgaggcttaaaagggttaggtaatgtgcacccaggctctcagttattggatggcagagtcgggatttgaacttgcatctgcctatcataaagttaatgcttttcaccattccatgtttccacaggtggctccttctaaaaattgaaggtaagattgatgctatattgctccccaccagtgattctcagccttaactgcacactgaaataacctgattttttaaaaggctgatgcctttgtcctacttccagagatgctggtacttgttctgagcatgagattttaaaatctctacagtgattctaatatgtagctatactactgttatattgtattagtctgtttctcatgctgctaataaagacaatacccgagactgggtaatttataaagaaaaagagatttaatggactcacagttccacgtggctggtgaggcctcacaatcatggtggaaggcaaaggaggagcaaagtcatgtcttacatggtggcaggcaagagaaaatgagagccaagtgaaagaggaaaccccttataaaaccatcagatcttgtgagagttattcactaccaccagacactatgagggaaactgcccccatgattcaattatctcccacagggtccctcccgtaacacatgagaattacgggagctacaattcaagatgagatttgtgtgaggacacagccaaaccatatcatatataacaggttatctatgaacaagcgatatcagcattacctgagcttttcagaaatgcaaattctgctctgggctcagtggctcatgcctgcactcccaatgctttgggaggcctagatgggaggattacttgagcccaggagttcaagaccatgctggacaacatagctataaccctatctctacaactaacaataatgaatgcaaatgtttaggttcctccctagacctgctaagtcagaacatctggagtgaactcaggaaactgtgttttaaaaatccctccagatgattctgatcctcatgaaaatttagaaattagcattttacaccaatgatgctcatccctgtgtatcagaatccctagagagcttaattaaaattggagagtccagattcatgccccagatctattaaaactgtattttcacatagcccttcaggcaattctgataaactcaggattgaaaaccacatatttatacaaaataaattgtactgctttatacgctttcagtgtttgtatatcagaatttatcagacttgatagtttttctccctctcagagagaaacataatacaaatctttgttccaaaagaaagatctgatgataacactgaagaactctcactctttgttgagagcagagctagattctgcagaattccagaatgacagattgattagtatctcatctataattaataggatgaatgtcagaaggacagctgaactgtgagccctgggatgaagtcacctacagccctaagacctgaaatgcacatctcagcagaagcctgactgcagccgttatccttgctgtggagatgaaccaaaggcccaagcgtgagtgacttcaagatgaaactcaggagctgaggctcagtgtggacattaaatttccgatgccagataagaaatcaaattctaattcttcacaaaattactgtcttcaatttccgttggcatatctaagaaatactggactgttactaattggccccttagctctgtgtcctggaacagaagaaattaagttcaggaaatatttctgttgcaggctatctagaaacttaaaaaaaaaaaaaaaaaaaaaaagcctcccttagtaacttttactgatagccattgatgtaggaaagaaaatctatatttagagaacatacttttaaaatcagctttcttttcaataaaatgccttcaattcctatgtttttcaattagttcagagtctaagaacaaacatttactgaatgcttatgggatagaaagcatagtactaaatgcggtgggtgatttaaaataattgatgtgtagtagaacttgttactgaaagtgtcatacacagaccgacaacattagcatcacttgggagcttcttagaactacagatctcaggccttaatttaggtctactaagccattttgataacatctctaggggatctgtatgaatattaaagattgagaaatattgcaatagaagatgtggtcttgccttctcaaagcagctggaaaagcaccatgtacatatatgaaaacgtaaatcatattaaaaattagggatagaccaaaacatggttcctcttcacaggaatcttacatttattagagacaaatgaatgtgacaagtttaataattaccttatatcaagttatccaaacctagaaactgaaaaagagattcgagactcttgacttactgagagaagctctcaggagaagaaaaataaaagtgagagaaagaaaagagaaaagaaagctgattttaaaagtatgttctctaaatatagatggggcaggagaggagcggaatgaagatctcagcttgggcctaatcacataggcagctctggagtgtgaattgtgccacagagctgatattgcctcaaggcaagggaataagcctcttgttctccatgtgagaaaatgagttgcagacatttgctatgggctgctcctgggtggaagtatgggacacaaatttctggccaaatggctgagttcagctaagttatctgaggaagcagagcaactgtgaggtgttagcagtcaactctcacagcgggtggtgggggaagggtgcactggctagtaaagggaatctggatgaggcaccaacagcattgccatgttctgaatgtttatgggccaccaaaatttatattttcaaatcttaacgtccaaagtgatggtattaggaaacggggtccttaggaagtaattaggtcatgagggcagagcactcatgagtgagattagtaccctataaaaatggccccagatagctcccttggtcttttccaccatgtgaggatacattgagagttggcagcctgcaactcggaagaggatccttaccagaacttagccatgctggcaccctgatcttggacttccagtctccagaacaataagaaataaatttctgtaatttataagtggttcagtctatggtacattggtatagtggtccaaatggaccaagacaagcatcccctggaataatctaagatgtaaagaacagtacaaggaattaggagaatggctgtcaggcaagcacatcacttgcagtatattttgtgtgttgagagggagaagtggtcactgtgtaagatgtgttctggaaagatttgccagagaaagtagaatttaaactggacattgaggaatgcagtcatcttcccctttccaataattgcatttgatttcctcctggggaactctcacctcctccaccatcatcacatgtggtttatgatgggaactatattccagacttgaggggtgtccataagactcaggtctaactggccaaggcatcacatccccttggtcacaggaattgcttctgggatgaggacttgactgaaaccacaagaggaagcctaataaacatgttcagctgttagaaaagagagcagcttctaggctgtagtgctcaaagattaatgtccactgagaagacacaagatttgaagattgagaaaaactgaggtctgaatatgtgaagcatgaatcctgactcactcctgggacttctctggatatgtgagcgaataaatgactaaattcaattttttgctcaagtcgatttgattagcctggttttccatatcttgcagttaaaagtgctctaggatttagatatgagtatagcttttccttttatatatacgtctgtatatatatgtatatatatacacatctatacatatatgtatatatatgtatatgtgtatgtatatatatacatatatacatatatacgtatacgtatacacatatatacgtatatgtatacatatatatatattcttgtagtcttaacaagacgtctttcttgttccttttatcttttttatgattcttttaattttattgacatcactgtagaaacacctttttttcagctgtaattatgtcctgtgttcagatcactcattcccaaaaccgaattgaaaatgctttctcaccagttacttcaaacctggactctctttttgagcccataaacttcatagaaggtaaaaaataaggtgaaagctaacatattttaaggaaaggtgatatcttttaacatttaatatattaatttattttttgactttgtaaagtaaaacattttaaagaaatttttttcagtagcaacctttatcaaactatatcttattttcaaataatgatagaaatagtctcacaaataagctgaaaattcactaacttaaaaaagagacctaatgaatatgacagtttagtattttaagatagcatcaaaatttgacaatttattgccagtgtcaaatagcataaagcaatcagaaatacctcaaggaaagaaacactgaaaataaataaacctgaattttcaaaatttcccttagaaccaacttatagtacacagttctaaaatttgtgtttctgggattacttatggtaaagttccagaactggcagaaaagtgaccactgttttagattatactactcacaataattgccatcaattgagtgctcaccaagtagacacttcatatacctgtctttctttcttttgtttttttgagatggagtttcccttttgtggcccaggctggggtgcaatggcatgatcccggctcactgcaacctctgccccctaggttcaagtgattctcctgcctcagcctccctagtagctgggattaaaggcatgcaccaccacacctggctaattttgtatttttagtagagatggggtttcactatgttggtcaggctggtttcgaactcctgacctcaggtgatttgcccacctcagcctcccaaactggtgggattacaagcatgagccatcgtgcctggcctctttcttaatccttataaccaaatctgagccttcattgagtgggtaagaatctgatgtaaagcgttaacctttcctgaccacacatggtgaataaacagtagagctggggtctaatcccaagtccctctgagtctagagtctgaacactctacatctgccatttctaatttgattttcctccctccctcttgccacacacctcatccttctgcagtacctttgaactcagcacactgaagaggctgaaatttacctggagtgaccttttcacctggacatatcaacaccaccaacaacagtagcctggcactgttttttccccttcaagcctgaagggggcaatgggcagtatcagagcgggagggctcatccctgtagcttttggcaaggctgagattctcctgtgacagaattatctacattaggcttcatccgacaggagtgcagtgaggagtgacattggtgtttcagccagagttccctcattctcctgtcaaagataagtcatcaacgcagcagctgcatccaatgacctctcactgcattctggtccaccctgaggttccacacttcattaaacacttgcccttccatacctaccattcacacttgggatgaaaatgcaagcgactccttgttatgcatggaagagtatgtatcttagcctggatatgctttgctctgctctaggctcttaaaacatatggaatatttgctggaatgaatgaatcctcagattaggaggaatgggcatggttgtcctttggaagttaagcatcttttttgaaaatgtgcgtggagacagaaaatctgtttatatggctttatgaaccccctttttttttttttttttttttttgagacggaggctcgctctgtcgcccaggctgagtgcagtggcgcgatctcggcttactgcaagctccgcctcctgggttcacgccattctccttcctcagcctcacgagtagctggaactacaggctcctgccaccactcccagcttagtttttgtatttttagtagagatggggtttcaccttgttagccaggatatgaaccactttttaaccagtgacttgttgaatatattttcaaaattgagttttctgtagactacttagtcctggaatttttagataattaattgttgtgtctttttatcctgattttctagaatgttctcataaatgtgtaaaaaccatcgcaatatagccctcttccccaccatctagcataataccatataaatatgaattacctattaaggaaataacaaaagactttgtattggtccacatcgaatttaataatcttgatttttccctaaatgtgtactctggtaatggagtgaaagctcctactatgcttatagatggcaagaacagaaagcagcattcttcttaaatcctgagctctacacattttcttggagtttgcaatagaaatcacttgtttctgccagcttgataacacttgatggacaacagagcccttaatgtccacacaggtgagcacccccttcttttcttttgattctcctggttggcattgcctttactccagggtcagactaattcagcactggccttagtaactggctagaaaataggtgcatgaaccaaggcaagcccctgagtgccctcaccaggacttttgatggagctaccacaaaagttgatttttactatgttggtggcacataagcctggaactaatagaggccatccttgtccttatttgaggtgatgttgcctaaaaagaaattcagcagagaaaagcagcaggactgagagatgaagagaagatttcctaagacacagttgtcattgtggctgaagttgggctattttgaactttacataatgaaacacacactcctatttgtttaagctcactagaactaagttttctgttacctacaaccaaagtgtcatactaacacaggaattctaaatacaatctactcatgtccataacccatcggaaattttctatgggattagatctttcaagaaatattcttatgcaagtgggttgatctgggtactctttcatgcattgaagtttttctaagtctctctggtgcaaatccaggtgtggtaaatatgtgggattcccaagaatatgcccgagatatggggtgaatccctactttttgcaggaaccacactgaactcagccaagatgacttaaagagatcttgacagtatctgaggaatactggcttagacagtatctctcaacttctaggggtcagaagtgtgatgaaaaataattgagaagggacttaaaggttttcatatttacctgaaacattcttcagcttcctgaattatgtactaaagttaaaatcaaagcacccttttgtattctgaataccctaaatacgagaaacttttctgaatctttacagataaataaaaagtcagcagtcttatctcttatacatcattttttatttcattagttctcaaacttcagaatgaatcagaatcacctggagggcctattaaaccacagtattgttttctaacaatttgcattcaacaagttccaggtgatgctgatctggggtaccatactttaagaatcactgacacatctcaataccattcacatgataagtgacagtgttgggtgaatggctaacactgagagggtaagctgcacatttgatgacaattactcagtagaacccattgctgatgaagaaggtaaaaaacatgttcctggatatattgatttaatcatttctcatctttttggggtgcaaagatgcatttctatgcccctgaacatagcaaccttctctcctagctgagccacgttccctaaatagcatacactggtgaagtaaagccattctgttgcctgcttctctttctgtggcttaaacagagtttgcagtggcctgaaaagtcatcagtcatgagaaacaagcttttctaaacactaggccagacagaacagattaggaaatctccaaactggataattagtcaagaaaaataaatatcctttagcaaaaaccataataatcacattgagctttcagctaatcaatttactgggccatctgtctaaggaacgatggcagaggtctatgcccaatctgtgaacctgcgggggggttgggggagactgtgatcaatggaaacttcttgtggacctaaaggaacctgaaagagcaagtcttccacccacagcctttcatgcctagaggttgtggggagcctcactttcagagaacatttctgtggctgttgctggacattgagatgcacattttcaggctgtcacccagtttgcacatgagatgggctgcatctgttcatctaaagattgtgccagcagcctttcttaggaaaatttttatattttaaattattacaattatttcctaaaattgttgtataatttttagttgatattatttacttttagtgaggtggccttacagagctcctactatgtgtaatcttccatatgaaagcattataaatgacctgagataatcgtggcttcaaggaacttgtggaatgattagggcaagaaaacacatgaagggcatcatctccacgaggcctccagccttagcccaacagtaattagatgccctccatctaggggcttctatgcatggggataatctcatctgtctgtagttcagcagactggaaacagattctaagaaaagaggaaggtcttgtttgtatgctcagcatctattacagtgactgacatatggtagacagtccattagtgtgtcatgaataaatgagaatgctctagaatgcatggcagcatgtactatctgcatcagcacagattttaattatcttaagagttaagaggacaggacaattcatagagtgctcagggaaatctactccaaacatgcactctgtaagtttaacataagagaaaagaagatgatctatgtggatggtacaacattcacaggcaagagaagggaagtgtacccagagctctgtgacagtaatgatactgcttcctatagtggagacttcaccttggagaagtaggaaaagatgatggtgaaagccatgtcaagtaacttaatggattatttcacaggctctacaacaatgccacgaagcagccactattatagctgagcaaacaaacgctgagaaaagataagcatctgctccacatcccacagtgagacatagtacagctaggcttggaggccagttctctgctctcaagtctgaactggtaactactgcagtatactgccaccctgtgagatcaagcagaggcctcccggacttgaaccaagaatcactgatctaaaaccattttctttacctttgagttttactgaactgtgaaccagggactgcagtcggaagtcagttgaaagtctaatggtttgtagagaattaatggttcctagattatcttaatggtactggctggtgaagtaagccagccagcacagaagatcaaagtcagcatactaggaagaaacaagccacattagtctgtgtcagagtttgggtcctgagttcagggactggatttgtcacaatcttcccaggaatgttaagggtatggtatttgtgtgggtctgctgagcccatcattggtttgaatatatggactcttgctctggaaagcattgtttcagtaatggggatcccagccatctcagtggaccatgcttactggttctgatggtctctggctttctactttgtacaagagttaccatgttgctttgaaatccccaatgccataggccaggtgggctctactctacccatccctgtccgtcatttcacagatatacgcttcttactaatacaggagttattaagaaataatttttaggcagatagaaagggtgaaagttcttggtggaattttcctttaatgaaaagcaaccaccaaaccatttcttctctaacagaaagcagcctagaagtcaggcatagatacgcacactagaagcttttatatgtaaatgcaagcagctctacctggaagccaggtgcattccatatggagcctcttgccctcttttccttgtcactacgtgtgccagatgtcatgacagcctccagataaagccacgtatgcaggacaacatggcgacaggccaggaagccgtatttgcatattaaaatgctagagtgggagggccagtttttttgcgggctacgtgaatgacgtacctcgtcaaaccaatcccctgggccctatgcaaatcagacaccacctcctccagcctcccaatataaccaactgcttttcaccataggcagggcttttccatccggagcccacctccctctttatgggggagctgttttcttctttcttgcccgttgaactttttgttctttaaaccactccacatgtgtccgtgtcactaattttctcggcgcatgaccaaggaccctgggtgcttctccaggcaacagagccatatcattactttcaatgttttgcttcaaccatctgagactgtagctaagatgagtgtcctggaagctctccatccaaggatctgtaggtacatggcgggctctgcttcccctggcattgcagcttttctgacacggactgctcatcagtttgagccactatataattggaaacatgggtatgatacatcaggatgcccacagcctgagttcatagttattcctcagcagaagtcagacatcaatggtacatggcaatggatgtaggggaagaggcagctaaagtcaagcatccagttgaaacatcagcactggaagcattatattttattcgaatattaagctctctctgatgtattctgggacaggaaaaactacccttggtagatggagtgatattcacttatgcaatgtcaaatatggttagagtaccctaggcactgtcctagatggtggaaatatggtgataaaggcagaaaaagcacccattttcatgaagcttatgatctagtagagagagactgataataaactataagaaatatataattatataactatataatatgtatatgattattatataattatgtaagttacattatataattataatgtgtaataattatataattatatcacataattatgtaatatataatattaacatgttaaaaagaaaaacaagccagctgggaatagaaagttatgagatgagcatattgctttagttagaatagtcacagaagttttttttaaagagcttgagatttgagactagacctggatgaaggagaatgagatggaaatttggggaagaagagtgctccaagaggggaagtcataagtgcaaaggtcctaaggcagaaatgagagtaacatgtttgagaactgcagggccagaagggctaaagcaaaatgaaatgtcaccacccacatgtccaccaaaatctagccttgatatatcaacgccacagtttgaaatacacatactgcagtcttaagttcaagctcaaagtaaatcgtaaacaaataatcaggaagtaccccaagaagtaactctgagactgggacaaatgcagagacatggaagccaagagtttccagagtggaatcaacgataacaggaaccaagaacatatgagcctatgtttagcaaatggggaaggttgtatacattcagctgagtcttaaagagtaagactaaaagtcatcagtgaatggctaaactgtagggcagaagtgaaacagtgtatagagaaagcaggtagtcacagaaaggggaaagaattagtcaagagaggaagaccacagaggtaaagtgccactttcatcacataacaacattgacattgatcaccaggctgaggtagtgtttgtcaggcttctcccctctaaagttaccctctttcctcacaatttccatactgtgctctttaaaggaagtaactatgcatagctcataccaaacagtagaagttgatacccacctcttccttgaaggttgagaatttaaataaattatttggaattattctgtacttgatatttgtccatttccttcatttaattatttatgcaatcatttatttatgttaatatgggctcataaatactttatactttgggttataatccaatatttttctattgattttattgtttaaatttctctagctttgaccattgagaactctttaagttggcttctgtgtccctttgccatatccccatcagagtgaggtatttttccaggtactttcgtactttctggcaataccacatttttaaggctcatcctatatatttcatttgacaatcctaggagctaccatttttacaagaagcactgtactgttaatggtgaatggtatgacaaaccaatatctgggtcataggtgtgctcattgctactgtggtgtcattgcttccagtagtatatttacatatttataaaatttatatatgtagccatatgtatctatattaagctaaatatcagttagcactgatgtctcctactctaatttattaccatgtggagcatttgactctcctctccttatgtatttataacttcccctcaacatctagaaatctgattcctaccatccactgaattgtccaatttcaggatacatgtgcattggcaacagaattattaacccatatattcatgaaaatcaactctatccaccacagtatggtgtctatgtacactctcttttgtctttagtcttacagactctactccactcaaagagtggactccacttatatccaaagttattgagttcagcaccttttcctccaccctgctcagtgaagttgtttcatagatttgtaatttaggtaaattattttgtcacgtgctgcattccatctcgggctctcccaaactcctaaatgattttttaaaattttcacacactaatgtttgttctacagtaaatttctgtgggatttaatatacgcatagtttatgtttccacaattatagtattaaacagaaaaattctactgccctaaaaaatttccctgtgtatcacttgttcaacctgccttttttccctctaaacccctggcaaacattgatatttttatcataactatagtgttgccttttccagaatatcatataattggaattatacagtatgtagtcttttcattgttttctttcacttagaaatatgcttaggaataggttttacttagagatagaaatttcagttagaaatatatttatacctgcctttttataacttgatagattatttatttctgtcactaaataatattccctggtatagatatgccaccatctgtttggctattcacctattaaaagacatcttggttgcttctatatttttctaacttcataatcataaagctgctgctataaacattcatgcgatggtttttatctggaaaaaaattttcaaatcatttgggtaaatatctagaaacaatgaaggctgaatcatatggtaaaactgtgcttaactttataagcaactgctaaactgcttctaaagtagctataccatttgcattcctaccagcaatatatgagaattcctgttgctccacatccttagcagtaattagtattgtcagatttttggatttttgcccttctaaagcaatatgcattaggtatatactgatacctcattatcgttttaatttgaaattcactaattgcaaacgatattgagcatgttttcatatgcttattttccatttgaatatcttctttggtgaaggatctattcagatctttcactcatttttaatgttttttccaattattgagttttaagagttcattatagatgttggatacaagttctctaccagacatatgtttttgcaaatatcttcttctagtttgttgcttgccttttgtttctcttgacagtgtctctgcagagcagttttaattttaacaaagttcaatgcattaatatttttccaagggttgtgatgttgatattttatttaaaaacccatcacaaatcccagtggtcataaatattttcttttatgttttcttctagatgttccataattttgcatgttatatttaggtatattatttgagttaatttttgcataagatctgtgtttaagatttctgtgtagtttttaaaaaatttttattattatttgcacatggatgtccaattgatccagaattatatggtgaaatgactattctttgtctattttattgcttttactcctttgtcaaagattagctaactgtatacagggggcctatttctggactctgtactgtttcatcattctatgtgtctgttcttttgctaatactgtactaactttttattgtagctttggaatatctctccatttattaatatcatttcttttgtaatagttttgtagcttcccatttatagatcttgtacatatcttgttaggtttatacacaaatatgtcatttggggggctattataagtgctattttcttttcaaattttaaatcccaattgttcattgctagtacacagaaagtaaattgacttgcatattaaccctgtatcccaagtttgccatccctactcattattttctttttctttcttctttctttccttcttccttctctccttccttccttcctctctcttttttttctttctttctttctcgtttctttcttcctttttctttattattttttttttttagacagagttctcactgtgtctcccaggctggagtgcaatagccaatcccggcccactgcaacctccgcctcccaggttcaagcaattatctggcctcagcctcccgagtagctgggattacaggcgcccaccaccacacccagctaatttttgtatttttagtagagactgggttttgccatgttggccaggctggtctcaaactcctgacctcaggtgaccggcccgcctcagcctcccaaagtgctaggattataggcatgagccaccacgcccggcccttactcactattttcaaagagttttatttttgtcagttctttgggattttatacatagactgtcatgtcatctgtaaatagggacaatttctttctttctttctactttataaagtttatatttctcttttttatcattgcattatctagaatttcaaataggaaattggatatgagtaatgagaaggcacatctttgacttgttctcaatcttatgaggaaagtgtccactttgccaccattaagcatgatgttaaatgtaggcttttgtgggcattattttttttatcatgttgagaatttaacagcattcctagtttgctgaaagtactgatcatgaatgagtgttgaatttttgtcacatgtttctctgcatcatttggtatgataatgtgattttttaaagcctctcaatgtggcagattacatttattggtttttgaatgctgaatcagttttgcctgcttcaaataaataccactctctcatggcgtataattctttttatactttgttggcatcaatttgataatattttgttgggaatatttgcaaatatgttcatgaaatatattaacctgtaagtttcttgtaatttattagtttagttttagtactagggaaacagaatgtgtcaggatgttctccctctgatcatattacgttgatgcaaaaggaattgcgatttctgccattacttttaaatagcaaaaatcgcaattatttttgcaccaacctaatagtctctggaagaaattgtggaaaacaaatagtattttttttctataaatatttggtagaattcacaagtgaagccccctgagatactggtgcttcatttttgtagatattgatctaatacacacatacacacacacacacaatacaaatattgatatattggactttgttaaaattatatattatacatagtatgcatattatacacatattacatatattttatatatatatataaaatatatataggtgcctattcaaagtgtttctttttgtgtgagtttttgtaccttgtgtttttcaaggaattggtccattacttccaagccattaaatttgtggccacagaggtatttataatattctttctaatcttttactctccattgcatcaatactgatcatccttctttcatttctgatattggtaatctatgacttgtttctttattcttgataagtctggctagatatttattaatataatattttcaaaaaccagtttttggtttgttttttctctattttttttctttcttaatgtcattggtttctgctctaagttttattatcgcttttattttatttgtttcatgcttaagttgctctgttttctctagttttcaaaagagaagtttaggttgctgattttaaatcatttttttccaataccagcatttaatactacacattttcccctaagcactgtttctgttgcatcccataaatatagatacatttgattttcattttgacttggtttatttttttcatattctttaagttatcttatttgcatgtgtcatttagaattgtgttgattaatttccaaatacttgggaattttccagctgtctttctgttagtaatttcttgtttaatgtcattgtggtatgagaacatacgtgttttgacatctagccttttaaatttgttaagatgtttcttatggcccagaatgtggtcagccttggtgaatattccatttgagcttgagaaaaatctgtattcttccgtgattggttgaggtattctataaatgtcattttgttcaagtagagtgatagtcctgatctagtcaactacatccttgctggttttcttctttcctaatctctcaatcactgagaggggtgaggggtgtgttcagcctccagcaaaaatagtgaatttgtcaaattttttttttagttttatcagtttttgcctcatatattctgacactctgttgtcaggtacatacacatttggctttattatgtcttttttggacaattgactcatttatctatgtaatgctcttcttcaatcctgataaattatcttgctctgaagtctgctttgtctgaagttaatgtgactacttcagctttctttagtttacttttagcataatatatctttctctatcctttcactttttaaaaaatttcaacagttttttaatgaaattcatataccatgcactttttccacttaaaatataaaattgagttttagtacattcctctttagctattactcccatcccctcatcatccccattcttaagcaaccactaatctactttctgctttttattgtgtcttttaactttttgtcaagagtcagacatgcactggttaataggaagagtagtaaataggcatttagtgaagtaatttgtttaatctagctagaagttggaccatggtttaatgttttctgaagctgtgggtgccagagatttcaaagatctcttgtgtcattgcttttgtctccttcttttactttgggcttccctaaatactcttcctcagagaggctgccttttacagctgtttcagctttaacccactgttcttatttggaatggtattggtgtgatggtaaggtgattgcatgtgtggtggggcagggggtattctaaagtattataattaaacgtctgcatcttagttggcctgtctctggatggtaaccttcaaatgtgccactccagtgtagattttccccctctttcccttactcctttccctagttaaaagtatttcaaatctgttttcttcagcctgtgacccctgtcgactatgtgtttttgttccctcttaggtgagataggaatattagaggaggctggaataagaagaaagccctttggagccggataagtctctcaaaaagcattttcccctggatagtaagacttcgttatggagaatgctctagatgcattgcacaatgattgttcttcctctgccttgccagggcctgaaggggatctttcttagatcttcatcccaggaacctggtgggtctcatggaagtaaaaactcatgaaaatatgaggtttcctcaagactggtcttcaggaggttcttcttttcacaaattgtacatactcagcttccagaaatatttcaacattaccaactgagtttcttctagtttataactaacatggtttctcctggtttctcctccaagtatgcaaaccttagctgtcattcttgatttacccgtctttccaaatttcagaagggtggtttgtcctgcaacctcagttctctaattggtccaagaaaggtccctggcttatttttctcagctttgttgttgttgttgtaaacatgagggtaacaactaccatctctttacccgtgaaagctaaaactggaagtctatttacttatctatttttacattaatagactttatttttattttggtaaaacacacataatacaaagcttaccagcttcaagattttttaagtatacagtttattagtgttaagtacattgacattgttgtgtaatcaacatccagaaattttatcttttctgtagttatttttaattttaaaaaattttttattgatgcataattttactgatacgtaatagttgtacgtatttatggggtgcatgtgacattttgatacatgcatatgatgtgtaatgatcaaatctgagtaattgggatagccatctccttaaacatttatcatgtctttttgttgaaaacatttcaaatcttctcttctagctatttgtgcaaaataaaaattctacacctgttaaacaactccccattcctccccttcctcctgcccttggcaaccaccagtttactttctgtctgtataaatctgattacttatactttatgttagtggaatcttacagtatttgtctctttgtcactagcttaatttacttagcatgatgtccttaatgttcattcatgttgtagcatgtttcagaatttctttccttttcaagactgaacaacattttattgtatatatgtaccacattttgtttatccattcatccactgttggacctttgggtagcttttactttgtggatactgtgaatttgctaaaataaacttaagtgtacaaatgtcacttttttgtttttgtttttgctttttgagacagggtcttgttctgtcacccaggctggagtgcaatggcatgatcttggctcactgcaacctccatcttccgggttcgagtgaatctcctgcctcagcctcccgagtaggtgggactacaggtgcgtgccaccatacctggctaatttttgtattttttttagtagagacagggtttcaccatattggccaggctggtctcgaactcctgacctcgtgatcctccctcctcagcctcccaaagtgctggcattacaggcgtgagccaccgcgcccggcctacaaatgtcactttaaaaccctgctttcaatgattttgagtatatacccagaagtgaagctgcttgattatgaagtaattttatttttaatgttttgaggaaccaccatactgtcttctgtagcagctgtctgactttatattctctacaataataaaggttaaaattgctctccatccttatcaacacttactgtccttatttttattacagtagtcatcctaattggtgtaagatggttttgatttgcatttatctaatgattagtgacgttgagcatcttcttttgcctttgttggctatttatataactagtttgtagaaatatctatgcaagttctttgtcctttaataaaaaacaggttatttgttttgttattaatagactgtagttttacggtggttttaaatttaaaaaattttttaaatgagcataatcagaaagtgcagagttctcatatatcctcacctcttcccacccagtttctctattattaaaaccttgcattaatgtggtataattgttataattaataagccactactgataaattattagattccatagtttacatgaaagttcaaccgtgtgtgttttatcttctatgagtttttatgaatgtataataacatttatctagccttacagtgtcatacagaatagttttactgccctaaaagtctcctgcggtccacctattcctctctccctttctccccacagacaactggcaatcgctaatcttttcagtttctcctagttttgccttttccataatgttatatagttgaaattatacaagatgtagccttttcagcttggctcgtgttacttagaaatttgtattaaaggtttctttttgtctttttgtggcttgatggttcatttatatcaacaaataatatttcattgtatgcatgtaccacagtttgtttatccattcaccaattaaaagacatcttggttgtttcaaagctttagcaattctaaataaagctgctataaatattcatgtgcaagtttctgtgcacacatgagttttcaattcatttgagcaattatcaagtagtgtaatggctggatcataggcaacagtatgtttagttttgtaagaaattgccaaactgttttccaaagtgactgtaccattgtgcatttccacctacaattcatgagagtttctgttgttccacaagttggtcagcctttggtgtttgccttgttttggattttagtcattctaataggtatgtagaggtatctcattgttttaatttgaaattctgtaatggcatattgtattgagcattatttcatatacattttttcccatctatatatttttagcaagtttctattaagatgtttcactcatttttaatcagataattggttttcttattcttgagttttaagagctctttgtgtattttggataccagtcctttatcaaatatgtgttttgtaaatattttctcccagtctatggcatgttatttcattctctgaacagggttttatatagagcagaaatgttccattttaatgaagtccaatttgtcaatgtttttctctcatagataaggcttttgttattatatctgaaaagtgattggcaaaaccatggtgacctaggtttctccaatgttatcttcgaggagtcttatagttttgtgttttacacttaggtctatgatccattttaagttaattttgtgaaagatataagatctatttttttttcttgtgaatgtccagttgttccagcaccagttgctgaaaggattattctttcttcattgaattgcctttgcttctttttcaaatatcagttggctgtttgtgtgggtctgtttctaagtcctttcttctgtttcattgatctgtttatctatttttcactaatctgagactgtcttatttattgtagcttttatagtaagatttaaagtaggaaaaatcagtcatctattttttaactccaaatttttcattttgaaagacatatacctgtggatatttattaatgcacattgttatcaaggtctgcattggtaacaaagattgcccataccctctgtttctcaacataccccaaactatgaccaggatttaggaacttgggatttctgatatcaaaatgaatacaccaagccttccaccttgttaaatattaagaaatcctgtacatctttctatgcccctggagcatctctgaggcacagaatgcagctatgcctccaggcacctggaggacattcagatgacatgcccagagtatggatatattgggggaatcaagagtagggtaacacttgtcttttacatgttaacccatgcttagagagagcagtgctgacaggggtccttttagttgggagctgctatcaggacttggcctgcccatcctctgagggccttctgtcctcactgaccccatctttctgtggtcagtctaaaggtcagcatcttccaatacttaactttcattatccccctcttaggatgccatagtgcctcctcttagatcaaaaaagttttctgcctgaaaactttctgcctttgacccatggagacagattagacacacacacacacacacacacacacacacacacacacacacacacacagtttccctactttgtcatgggtgacggaaagaaataggttttgtgccttcaaaatgagggatcatctctctccagagcatagccaataaaaagaaaagacatttaatctctgatagagcattctccctgttgtatacatttttatttgctagtaatcctaacataatccacgctacatattgaagtgctcatttctttcattttctctgtctcctgagcatccactcctggctataggcagcagcattggttttatattggctttttaaatcaaaagccatcctccatcaaagcttagacaaaagaaatagacaggtgctgaaatatttacagatagattatgcctctggctataccatgcctcaaaacagcacagtcagataatgtattccatcaaggcaagaaactcaagacccttgcctcactggacaattagacaaagaggagtaatgggtattctcttcaccttggaggagagaacaaaaggtagtagtaccctctcacagccagaggaacattcccactcccaataccaatgtcattccagataaaatgctctttgtaagagtcagtatcgttaactgactcagtcatgagtaagtggagttagatcaaaaatgagaggaattatttttgtgatcgttaaatagcagagaaatctgtgtcctctctaaagaaaagttttacagtaccttttttatagtacaggacatatttccattaaaaaaaagatgggcttggttttcagattagtattcagttcataactctaagttacatactataagtaaagaaacttttttccttgtcatcacaatgaatagaaactttctctcatgcttatttttttcttagaaattaggcatggaggatgatgcatgttttttcataactgctttgtgcctgtgtgacatcaaaaaggtattcatccccaatttgaaacatgaacattttactgcttttttagttgtcacaaaagtatagaatggacagcagaataaggagcatattttcagttctgcctttttcaagtactagttaactagttggtggctcataccctcctcttcattctcttctcatttatccacagttttgccatttcactttttcatcatgtcagaagagagatacaaagaggtaataaaattcagagtaatcagttttggttgcatttactatgtcttataaaaggctgaatgaaatggattttgacattactgactaaaaaattgagagaagaatatttgtatttcctttgggtccatgttctcctgcttttgccaattcttcataggatgaagaggatgtggcttgcacatatgcacactcaataaataatatttgaatgaatgatgtataatggtgggacttcatacacttctcacatctcacctgactctcttttctctctttccatccttctctttctgtctctcacatgcacatacacacgcacatgcacatgaacacatacacaatgactttcaaattttagtgcacattagaattacgtagaagagttattcaaaagcacattcattactgggcccaagacctgattttctaattcagtttgtctgagattggcccaaggatttgcatttctaacatgtgcctaggtgatgctcatgctacttgtccagggaccacacttagaaaatcactgctctaatacatgtgtcttctccttcctatggcctttccctctacacacaaatactctctgcagcaaacaagtataattccctttgtcacatcctctcagttcctctcggattttaaccacagctgtgctgggcaggtccattcaagtctcaagctgccagaggccaccttcatctgggaatttctctgctcttctgtcttggagccaccttcaaagaggcagaagccactcaacacacagcccagaagtatagaggaggtaaagtccatgagggatgggaatgtgccccagcctcttgtttgtcatgaagacaattctgagatgtttactgtaagtgaatgtggcccatggaatcaagaccccatttcctacagtgatgcccttgatacagcacattcctattggctgttccaccttccctgtctcatctcctttcctcactcctgtcccctacgtcacattctgataagctacctttaccagtgccttccctgtctcatctcctttcctcactcctgtcccctacgtcacattctgataagctacctttaccagtgcctttttcctacatgttgctttcaagagaatctgaacacaaacacctgccctgaatcccagaggctataagctactgtcctacttccctcactcccttcatcaacagctatcttgatgactatgcactcaatttcttcatttcctcaccttttagttgcttctcaaacttgaaagaaaagatgatctctatctggtgcattttcccaaagcccatgccaggaaatgaattttttctatttcagattccatgtgctttttccagactcctttctccttcattctgcaagattttatggatgttcactctcccttgcttttgaaactcagaaaaagtgccatctctcttttgaatttggacaatctgcttttctgccaatatagtgttctttcagatctctctcacactttattgtgcttgcttggtcatatgtcctgtctccttctaatgagctccttgttcagacgctcccaggttttctagattcatgacatccttggtatcttggtaatttgtttcacaatgcccttaggccaaaggaaacaataatggttccattcattaaagagttatatctgagcaacttaataagtatgtacgtcttaacaaattagtagcaatttgaaaacatgacatacctaaatactggctcagttctaaacaagcacagttactaataggttgtgtgtacctgttgaccactgcaaaacttttcaaaattcaggatcagatcaaacatcctcacactcactccattttccacattgatttctatgtttgcttatttgaaatcttgtgttttcaaagttatggcatcattaacaagaacatagcatgagttaatgttgaaactgtgagctactttgatttaataatttgtgcggtcctatacatgttaagtaggcctgtgtttcccctcaaatttaaaatattctactgtacctttgtgaattcacaatagtactgtgggttgcctcagtgcaggatttggaaacctttgtcttgagaacacaatacgctctgttatgggttgaattactttccccagaggagatatataaagtcctaaccccagtaccgcagcatatgactttatttctgtctttgcaaatttaaccaagttaaaaatgaggttatcagggtgggctttgagccaatataactgctgtccttataaaaaggggatatttggacacagaggcagatggacacagagggaaaactatgtgaagatgcgtagggcaaatgccatgtgaagacaaaagattgaagcaatgcatcaacaagccaagaaatgccaaagactgctggcaagccaccagaagctaggaaaatgcagggaaggacttcttttccagtttcagagggagcatggctctctcaacaccttggttgtactgtggacttttggcctgcagaattatgatataatagtttctgttgttctgagttatcccttgtgtcatactttgttatggcagtcctaggaaactaataatacagcactcacaaataaaaccctctcttctccatacaagtgtaatatgaactgctaggggcagagactataatattcacctctcctgtttctttagttatagaactcatatttttagacacatcaatgattagctagatgtcatttttgccttcttttgcatacaaggtgaccaatgaaattcaagcagaagtcattaaataggacttttttttgaaaggtcttaaaataggctgattcatctgagaggcagatcctttcagctcttcatcctcatttctacctaaactgtgaatctgatggctggaacttccacagtccacttgtaattattagaagaccttaaggaaggaagccatgtgctaaggatagaagatggctgcatccctaggctatcatctaagttctaaacagctgaccttcagactttttgtttaggaaagaaaaataagcctttatttatcttatttaggccattgttagttggttttgttgtatgcctaaattagtcactagccctaacctgtattttaaagttcaattccatatttataactgcattatggacttttctacctaggtataatgtttattgctggaaatttaataacactgaagccaatgctcaaccactgtccaaactaggtcaacatctggactatattatttctatcaatggaatcatcatccttttggcattaaaacttaaactttagagccatattttgcttccctatttgcctagaatccctcccaactcattgatttactattgaatgaacaagtaattattaaccagctactaagtccccagttctgctggtgtacgtgctggaaacagagcagtgagtagcactgacacagtcttactctcaagaatcttacattttagttgggatgatgggtaataaacttttaagcaaacacttgtgtaaaataatggcaagtttggatcaatgttatataataaaataagaaattatattactttgcttgagctgccataagcaagtatgacagactaggtggcttaaataacagaaatttattttctcaaagtccaggaatttagaagttcaaggtgttcacacagttgatttcttccaactcctttctcctttatttgtagatgttctctctctacctttgcaaggtcttttctttgtatctgtgtcctaatttcctcttaaaagacatcagggctgggcatggtggctcatgcctgtaatcccagcactttgggaggctgaggcaggaggatcacctgaggtcaggagttcaagaccagcctgactaacatggagaaacctcatctctactaaaaatataaaatcagccgggtgaggtggcacatgcccgtaatcccagctactcaggaggctgaggcaggataatcgcttgaacccggtaggcgaaagttgcggtgtgctgagatggtgccattgcactccagcctgggcaacaagagtgaaactccatctcaaaaaaaaaaaaaaaaaagacagcagttgcattgaatgagagagcccaccctaatgacctcatttaacgttaattacttctttgatggccatatatccaaatatagtcacattctgaaacactagggattatacctataaatttggttaaaaagtgaaaacaacccaaatgtccatcaattggacaaacaaaatgatgaatggacaaacaaaatggttttagccttacaacagaatattatgtctttaaagggaataaaatactggctcatgctacaacatagatgaaccttgagaccattttgctaggtgaaaggagctagcataaaaggtcacatattatttagccacgtttataaaaaatgtccagaataggcaaattcatgaagactgaaaatagatcagtctttgccatgggctgaggggaggagagactagattgaccactaaagaatatagggaggtgggggtttctttttggagtgatgaaaatattctgggacaaggttgtggtaatgtttgcacaactttgtgactatattgaacatcactgaatcgtctactacataagggtttaactgtatggtgcgtgaattatatctccattgaaaaatgtcgaatctcctaactccttgctctggctcagtggttcattgaactttatctctaaaggggaggcttgaattttcaactacgcctccactaagactcacaacctaaggtggttccattgatgttgagtgagagtgaagaaaaacagataagttagtcatagtcttcttggcagaaaatggtttgcaaggactaaagagggttttgctttgtccaaatttagcaaaatctgccgaagcatgagctgaccttttctgttaagctccaccttttaaccagcaaagggtaaaatgaaagattaaggagggagggaggattggcagagcaaaagagtgaagaatccagattctgaaaccaggatttctaggttttaatctcagcagagccatttctatcagtggaagcttcaggcaatcactaaccactgtgtgccacagttacttcatttctaaacgtggaagttagttctacatattagaattgttatgctgatttagtgagtcaatatttgtaaagcatttacaactgtgtcacacacatagtaagcatgatataaatgtttgttaatataacatgttatattaacaataaaaaatgaggtgatggtgagcacagttataacgtagaaaatataactacacatatatgtagtatataatgtagtacttattaaaataaagaataacacaacttgctatttattaacccttatagatttagcttaacttggctcaagcccctagttttgcatctgagtctgatgcctccatttatctcagaatttctggacctacatttccaaggatttacctgcctcctcccctccatctttaaacgctacctgcatttatttatttatttcctttctttctttctttctcttttcttttcttctctttttctttctttctttcttgttttgttttgtttttttgagacagagtcttggtctgttgcccgggctggagtgcagtggtgcaatctcagctccctgcaacctctgcctcccagtttcaagcaattttcctgcctcagcctcctgagtaggtggaattacaaatgcacaccaccacatctcgctaattttttttttttttttgtatttttagtagagatgaggtttcaccatgttggccaggctggtctcaaactcctgacctcaggtaatccacccacctcatcctcccaaagtgctgggtttacaagtgtgagccacagtgcccagcccctgcatttcatctcttgcctacataccacactacagaaaccttgcataaactctcttcccctgtgctatggactgagttgagtctcccaaaatttacacgttgaagctctaacccccaaggtggtcacattgggatgggaggtaattaggtttagatgtaatgggagtggggtcctcgtgctgggattagtgtccttataagaagtgacaccagggagcttgtcacttgtctctctctctctccctccctccccatttgcctgcccctgctaccccatgtccatgcatgtacaaagaagagctcatgtgaacacatagggagatggaggctacgtataagccaagagaagaggtctcagaatgaaacctaccttgccggtaccttggacttccctgcctccagaacagtcagaaagatatttgtagttcaagccacccagtctatgatattttgtttggcagtccaagctgactaccactctccgcttcagtggcaaacaccactgtatggaaaatagctcttattcttgaaagttggataagcaaagaatgttacatttctttattttatctcttattttctctataactcaagttgaatctaattctatgtacattatctgttaagctggcaaaaaaatttccagagccttcttgctgtctctccactcagcgtcatgtcctattttcagatgcatggcagacactcgtggagggtcttctggtgcccagcccattaatggtgtctaccctgggctttgtgagctcaaagtctggcctctctgctactctgatggcagtctcatgccatggaattcctgggagtgattgaaatctcagagtttggggtcagccttctgacagtcactacacagtcctgatatctgagtttggtgacttccccagggtgcagggtacaactctaatccctggtgtcctgcatggtggggatctgaccagaagagaccaagtcacgtcagcatcccactggttatccaagcctagaccagggctctctattgaaaccttgctggccaatccatcttattccctgaaagctgtcagcaccacagccctttttctttctctcatttgtacttcatagagagtgagaattctagaatcttcttagatgacatccaaattgtccagcattcttcttggaactaataattccagtccagcctgattatccaaaatatacactctgagcatgtgttatacttgctacacagtttcacatcttaatgcatatggactttcacctccctgctcatctgtgatcagcaaatagatataaaacccacacaattcttccagttgccacacacctgggcaagtattgttaggcatctccctaaagaaacaggcatctgggacttggagaccacagagcggtatggtccagtagaattgtctgtgatgacggacattacctacgtttgttctgtcaaacgcagtagccactagccacaggtagatatggaacacatgaagtgtggctggggaaggtgtcccaactgaaacatttgaaatgtaagacttcttttcattttcactttagtgcatttatacttgcatttaaatagccccttgtggctaggggctactatattgcccagtggaggcagcaggaagcattcccaaagtgagagcacacagcttttccaccaccttcagaccagaggcctgcccctcttgcagcatttcagtggcatattctaacccagtatttccaaatatgagtaacacatagatatcttttaaagaaaaatagaatttctgtaccatagtattgcctctgaatttcatatgactttagtgcttcctgtaaaagtgatggctcaattctctcaccagttttctcttattaaacagccacaaaatctttattggtagcatgtaaagatatcttagagctattacttgtctccataaatgcaaatgctgacactgcaattgcaggacaagacttacttatacgggcttatctgggggacccaaagtagcctttaaaatgttactcttttattcacttatcaaatgaaaaccacaaatgcaaaatttccgctaaagaattcataaatcccagtttgattgaaactgttctaacatcaattttaaaatatcccatttcctgacactgcattcctggcaaataaatatctccagtttctgaaaatgagtagccttcaccagggcccagcggttactgacaaccagcagtttctgacaagcagttactgtgggactgacacagtcaagtgcctagggtacagggaatcctctcccaacaaatgaggacccactatggagctcctttcccttctagaatgctctccagtttctacaacaacaaaataccttagttaaacattaccaacttccagtttggaatttcatgagtcactctggtaattttacatcattcacctggctctctcatgcacctggatccctctgaagcatccagtcttggaagtgcttccccaggggctttaaagcatatctcaaaatagtttccacatctctcctgttataaagaacactgtgtcatctatggatcaatatttactccctgcatgatgagttgcagttttgcaattgaggtttggtggactcagttccaggagagtgatttaatgatacagctggacattgctctttaagatccatattctggagaaaccccctccaatgtatcgcctgtataaataacctggagtcatgctgcctgtcagaaatttaggtaaccctaataggaacactcaacttcactatgtggatggttccagtgtctctcccccaattttataaaatcctcagtggtaccatcccattgtggttttctctcatctccatactcagtactatgtcagccatttaggctcactccctttaccagcaccctcaagaaacagtcacaacttacctgtttggagagagggattctctagccatgggttcagctcttaccatatcactccctcctccactttctgcccatcttctgctaacttccaaagacccatattcctagcacacatctttcccaccaggcaccacgctatgtaaactattgcccagcactcctaccccaaattccttttcgttataagaagaaaaaaaaaatgccaatccacaatctggtttgcatgacctgtatctccatccattgattcagacttttattttaaggaaaagtttctgtaagatccttctgccttctgtgtgtatttaaagtagaatgcttatttcctcaaatctttagtatagccaagtttcatatgacacatcaccttctcattcaattccagccacattaaagcaggcacaatttctctgaagaggaatagaactccaaaggcaccctgattatagcattatcccactcaaacggaaataatatcagcaatttgtctgctaggggatgaagtttaatgactgaactcaaatctttggagggcataataaaacactgaaaaacattctgaaatgatcagaatcactgaagatgtaatatatatatattttataacaggctttttcagtgataacttatctagagagaaaattgttttagaatctggaaaatcagctgacattaaaagcacgtaaaactagactatttatagcctcccactttcttgtcttctaaattgtcagtatcatctaacattaaattattttttgaacaagaaatatgttttcaatgtttaagtagtcttgccacttaaaagttacaaaggagctaatcaatagtagtcacccaaccttagaaacttaggttctattgtgtgagagggaaataaaagaattcaagggctctctataggttagcttttgctgcgtaacaaaccatgccaaagctaatcatcaatttagtacatcattttgtgagtcagtaattggggttgggctcaacggggttgttgttctggtgtcagctggataactcacatgtgtacagtcaagtaccagatatttgacaagggtgactgttctggaatgatcttgcttggaacagattatttctgcttcatacttaaaataaataaataaataaatcttccaccaggatagcttggacttgttctcagctgttttgtggtttcaagagagagacagggcatgcaaggtctcctgagatccggactcagagctgacgcacagttacttctgctgcattcattaaagcaagtcaccagccaggtcaaatttacaggatggggaattaggtttcacctctcaacaggaaaagctacagtcacatgacaagtgagcatggatataggaagaggaattttttcaatctcccacaaagacatgtcctaagtttgaagcatttaaaatctacaagttaaaaaaaaatacccaggaaactcctgagaaaaaacaacagggtcctcatccatgattgctgttaattgataagcagttactcaaatcactgtgtctctctgaaggtagtttttatttgcccactcaatcgtatctctactcccaccacacctgatctcttccatcttcttctctggttttcttcagtcttctcgaaactaaacaaagttaatggttgattaccggtgatttctgtctaaaactttattgtgatagttgatgtcctgggcaatttgttttgatatttgacctaagtagacaagtactacaaccctagagatttactgataggcctatattctcccttaaggaacactgtccctaaagcttgtcacactcttgtccaaaatgaaaaacttataaaatgtttttataaacagtattgcacttgagatgcaagcttagataaggactttaagagtcctgtatgtccagactgaaaagctaaatgatacccattaaagagtcctgaccgtgtatttggtctgccaatgaataatattggtaatgaagcctacttctggattttcaacagtgtgggcagatccctctagaccagtgttatccaatgaaaatataatgtgtgccacttgtgtcaacttaacttttctagtagtcacatttataaagtaaaaaataaaaaataggtgaaattaacattaaaagtgtgttttatttaactccatatttccaaaatattagatcttcaatgtaaaataaaatgtgaccctcattttgcctttgagggctaaaagtaggtaatggacttctttttatgctctgtgtctaactcagttcttggcacataagatgtgactaatagatgtaggatgaatgaaagaataatgtctaaatcaacaaaaaaaagtgagggcctattatctgatattaagtaattcagtctttaaagactatgttgtcattacctagagggataaccattttttccccatgaattttggttttaaattcttgaaactaaatgccagcccaagtggtttaatcatacacttttaagccttaaacaacctacattgtcactgaattccacttggaagctgatttaaagacagaaattccttagacacagggtaagttttgcatcaaggctagtgttggaataaccaggagtgcctggtaaggacagtccttgtctgcctcagggtccttcttaaggacatatatttattttccagtaaatggatttcatgtagtttacacctacaactcccacttgactctcagttctatgacagctattttttcctgctataaaagcacttagtctcttaactccacttggtaggcatttcttcaaatattcataaagttttctgcaaatgtccaagttttctttctgcatccataaatatatcagtaaaagaagaatcacatatcaaaccaagacaggtttcaaacttcagcctgagattcgctttgaacttaaaaatctctaaaatgtacatcacagtttgttttttctagtgctttttttaatgctttttctaaacaaagaaaggctgggtctgaagtgaggaaaactgtgagcaaaaagaagagttatcagaggttggtagacccaaaacactgcacccaccaacttgaccaactcaaatggcgtattttaatgggtatgaattcatatggctaacaaatccgctatcaacaagggacagctctgctttttacctcctcagtcatttagttattaaataaaaaaaaaatactgaatatttgctattgaacagtgctgggctagcagcaatgttgagcactctagaagcataactcatgatcccttcctctttccttcaagttgtttaagttctatttgggccaggcacagtggctcattcctataatcccagtcactaaggaggtaaaggcaggaggattgcttcttgaggccaggagttcgaaactgcagtgagctataatcacaccactgcactccagcctgggcaacagagtgagaccccatctcaaaaacaaaatagtttggtttgggaaataagcccaaggtcatctcaataccactgttcctccctatttcctttttgcaaaatccctttagggtgagtggattgcttccttaaaaagactttcctatcacctcaataatataatatactacagttagctttattatttggaattattgctattatcaatacctggaaaatatgtttgattgatagtctaattgctgatctgtctctaattttgctacagtcataaaaagctaagaacaaaacaataggtggcaggcacttgcacattctaaaatgaagtattgggctatttgtgcatgacttgcagaggagatgggggaaaagaaaggttgtcatggcctgagcccaatactcacaagtgtaaggcagtgtcaattaagagtaaactatcaaagaaagagatggggagagtcattggtttgctgtggattttccctccctcacccagtgttggtgggaagcagggtggtttgaccccagtctgaaagaggcttcaggaaatctggtggagactgtgttccccaggtggtgttagaccctcaggtggaaagtctcaggaagagaaactgattatggctgccccagctgccctgacaatgaagcaaggagagtcagccataatggaaatggcctggactctcacagatcaagaggactagccaaagaagatacctaaagtggaattctctgaagcagaactagaggcaagtctctcagttgaaaggatcttagcaaatcgaggctgcaggctgcacccgcagagaaaaagctgggagttagcgtcatccatgtcaaggacccctgaagattccttcagtacatgtgcagaaaaagctttgtgcattggccaagcccagagcataacaaagccagggcatggcagtctcacaaggaagacctcccctgcctccctccacccagctctaaaggggtgagaaactatcaaaggaggtagtaaggaggaggaggaggaaaggagaagcacaagataagaaaacaaatcaatgattgtctacaatcctttttccctgttatagggttctatcagttggcgaagtgagaagctttagctatacttgaagtagttaagagttttgattagtccatggggctgggtactttcattactgaaatgaaactgttttgtgctgtaaagtgattatagaatttttgtagtctgagttatgatataaattaaagatgttttcgtgttggaccaacatttcatccaggaaatgatgcaaactaatatcacacaatttggataagttctgaagtgtaagagtacagttattttgtgattcttccttctagatcttgctttttcaatgaagtagtgatagacatttatgtgcttgcttattttccatctttctcactggaacataagctccccaagggcaaggacctttctcttttattcatcattgattcctctgagcctagaagcatgtcaagcacattgtgagtgcttagcaaatatctgttgaataaatacataaatgaatagctgtggataggggattacaggctcttctaagtgatttttcttggggaaaatgtcttggctaaaattttttttaaaaggaaacataaaaatccataaataatccctgcaaaaagaatagtctatgaatagtgcttacccaaactagccataattaacactggcttcagtggaggaggctcaaaagtcacatttaggcttcccttgtctaaaatctcagctgcttacaatattcagcttatgtaactaattatactgtggcaggttttcttcctcctttgcatctactcatgtgatattctactgctaataaaactgtcaattttcttttacttcaataaaaggtcacacatgacaacaaccccttttgcctactaacagcaagggcctttattaatattttaaatgtacacagtgatatttccaaaaggtcagattttttaaaagacataaaatgtcagttctaattctttttcctccccttctctgctccccaacccatcaccaccacgttgctgttcagccttagatattgtgcttattataaattgtgttcaaccaggtaaacatcaggtgggggtatcagactgggggcaccgcacaggaggcacatgtcttaaccgtccatagttatcccatggctaaatgtacaaacatggctataatgggcagctttctgaatataaatattttatgagctagcaccaataggtcttatatcctagtctttttttgcaacactatactaatctatgccatggaacaaattgccccacaatttaatggcttaaaacaacagacactttgtgagtcagaagtctgggtatggtttagtgggtgctccagtttggggtctctcacaagctgcaatcaaaatgttggcaggggctacagtcagctcaaggctcaagggagggaggacttacttccaagctcactcaagtggctgttgacaagattcagtgtttctcaggatgttggactacaagctggattttgaccagagggtgccctcagctccttgccacctggacctttccagaggacagctccagcatggcactgaactccctcagagcaagcaagtgagagggtgaggggtagcgaacaaggtggaagtcacaatctttctgtagcatgaccttggaagtgacagccatcattgttgctgtattctgtgtatttaaagtgagtcaccaggtttagttcacattcgaagagaggggattactcaagggtatggataccaggaagcaggaatcactgggtcccatctgagtgaggctgtagaggctgcatactacaaaaggtgagcttgaattttcaccaaatacttaaaaaataaaaataaaaaaagcactgtctactatgcgataagcacagcattaggaattttatgtaaaataattcattattttagaaaaaatttataaggtggatggatgctgctaacatccacatgttatagatgaagaaactgaggctcagcaacataaagtaacttctccaagatctcatgactggtttgaggcagcccctgctcttattccttgcatgacacaactttaatttgctccctctccaaccttcctttgtgatcagtgatagacatttacagatagtcagctaggagttagatcacatctgtggctatgagagtatgaaatgagctagattcatgcatatgattcaggaattgaactgtaacttaaacagagcaaacattgtttttctgtgctgaaaactagggataggagtgagtcagacatgaccattacctacagagtgctactgtgtgcaggggactgagatgtaaagactgtgatatggggcagaatgtatcagtaactaatccattaagattcaatgaatcttacctgggaagggatatcatgaaaggatttgccaattttatttgtctaaggaagccaaaacgtggtttctgcctatgaacgatttgttaaggaccccacctgcctccttgtggggacatgatttaaaacgttacctactgctaagctctactaaaccagtgccaaattgccgaagtgcaagagaagtttcttctgcagcttaaattctctagagtagttattttatttaatttggggtccacagaaccctttaagtagttaataaaagctaagaaacttcttctcagacaaattaagatattctcaacactacaatatcagagtttccatgtcaccagtttataaacatcttctttagcattaagataaaaatcaggccagtaatcccagaactttgggaggccaaggagggaggattgcttgagcgcaggagtttgaaaccagcctgggaaatgtagtgagacttcatctctacaaaaaaaaacaaaaataaaaataaattatcaaggagtgcacctggatatataaattatccaggaggcaagcacctatcccagctactcaggaggctgaagtgggaggattgtttgagcctgggaagtggaggttgcagtgagctgagactgcagcactgcacgatatttctcaaaaaagaaaaaaaaaaaaggaaaagataaagtcacttgaccacttgatttaaacatcaagataccaatgagaattacttgataatcatcatctctatctttttcatccaccctgaagaagcaggcttataaaatcatatctagtccaggaagcagtaccagtatatgcaaggaggaactctagtatattttgtctttaataccatgcaaaatgaggatggcatcctactgtggtatcagtagaaaccatgaggagaaatggaaatcccattcagctcagaagtaacaagaacaaacatagaaagaataatcaataccaattctatacaatcttttccagataaatagaagagaaaataacacttttcaatttatattatgaagctatattaccctgatagcaaaacaaatatagcatagaaatggaaaacaacagttcactatccctcagaattatagatggcggggtgcagtggctcatgactataatcccaacattttgggaggccaaggtgggcagatcacctgaggtcaggagtttgagaccagcctggccaatatggtgaaaccccatctctactaaaaatacaaaacatagctgggcgtggtggcgggtgcctgtaatcccagctactcgggaggctgaggcaggagaattgcctgaacctgggaggcagaggttgcagcgagccaagattgcaccattgcactccagcctgggtgacagagcaagactccgtctcaaacaaacaaacaaaaattagtaaatagaattcagcaatatataaaaataagtatgtactataagcaaatagagttcatttcagggaggcaaacctagtttagtatttaaaaattcatatatcccatcatattaacaggctaaaggagaaaaattatatgattacatcaattcaatgaaggaaaagcatttttaaaaattcaatatctattcataataaaattcttagtcaaataagcaaaaggggaggttcttcaattaagtacatctacaaaaaaacccgtggctcgcattatgatgaacagtgaaaaactgaatatttactctctaagatggagaataaggcaaggatgtcctctcatcacttttattcaacatagcactggaaactttagccaggtcaataaggcacatatagatcaatcaatcaattgatcaaccaatcaatggcatatagatcagaaagaaaacaaataagatgatttctattttcagataatatcgttgtctacgtagaaattctaaacagatctacaaaaacactcctacaactgataaatgagttcacaaagcttgcaaaataaagataaacatagaaaactcaattgtatttctatgtactaacaatgtatatttgggaaccaaaattaaatactgtttacagtcactcaaaaactaaaatacttaggtataaatctaccaaaatattcacaggacttatttactgaaaactacataatgctaatgaaagaaataagcgaaaatgtaaatagatgaaaataccatgttggtggattggaagactcaacataccagtgatgtcagttctcctcaaattgttttacagctttcatgcaattgctagcaaaatcacagcaagtttcttggagatatagaaaagattattctagaatttctaaggaagagacaagtgactagaatggctacaactgagtaaagagtacaggggatctgtctgtattatttcttacaactgcatgtgaatctacaattatctcaaaataaaatgtttaatttataaaagttggcggaaaatcattaaaagaaaaaaataagaatggcatacttatctaccgtggaatcccaagatttgtgccaccctacaaattcagaactacccttggcactccacatagagggaagctaagtcctgcagagcagagattctgttttacaatttgatttagaaacaatgagctcaggcaagttacacatcattgaacctacaaagtagccacacaaaataatgacatgaatacaatcaccaacctagagatgccttacagacactgcaactgatattcagttttacagacattcagtaactacatacatcatgggcatcttccattgacacttcttttatgaaacattagaaaattctacttcacttggcagccacaggacaactggtccccattccaaacaattaggaattgccaactgatatacaattatgggtcaccttgaaaagaatttaaaaagaagtagtagagtttgaggctcagatgaattaagtgaataggattctgcattgaagggaagaactataaggaaaatggagctaatatttgagcccatttttagtctttagtttcatgctttttccacagcactatactgtctctctccagaggcaatagtaagtcatataccagtattggtctaccttatttcaattactactgcctcacactcaaatataatttatttaaaaataaaaagatgaaatatatgtataaccatctgcaacctgacatagaggaaacaaaaaaataaatggatgaaactggaagctattatcctaagcgatctaacacaggaacaaaaaaacaaatactgcatgttctcacttataagtgggagctaaactttgagtacatatagacacaaagaagagaacaacagacaccaggacctacttaagggtggaggtttggactacagggaggatagaaaaaccatctactgggtactggccaggtgcgatggctcacgcctataatcccagcactttgggagactgaggcaggcggatcatgaggtcaggagatcaagaccatcctggctaacatggtgaaaccccgtctctactaaaaatacaaaaaattagacgggcgtagtggcatgcgcctgtagtcccagctacttgggaggttgaggcaggagaatggcctgaacccgggagactgagcttgcattgagccgagattatgccactgcactccagcctgggggacagagggagactctgtctcaaaaaaaaaaaaaaaaaaagaaagaaagaaaagaaaagaaaaagaaaaactatcgactaggtactacacttattacctgagtgatgaaattatctgtacaccaaacccccgtgacacacaatttacctatataacaaacttgcacatgtatccctgaatctaaaataaaagttgaaaaaacaaaccaaaaccaaaaaaatggaagtttgcagcagaagacccaacaccacatctcattactgttagcttattaatattcttatgactttattaaccccattatttttcagagtctcctgttctttcaatgagcttcatgtctttgctgttagagtttttgttttaagatcaaatgaaattaaatagatggaacttgaagagttaaaggtactataataaaataagacccatctatcattaagaaataattattacaataaacagaaattaaaacaccagacacagtaagaaatgggtctcctccctaagcatgcctattccagattatgcctgaatgtcttccttcctctgccatctgaagtctctcagtcgtaaatctcaataaaacctttaaaaagcaatttggtagaaaaatgttttagctaaatgccttcgcaatgatatgttgagaggacttaattcctcctgcttatgcttctctcatcttacaaggatgttgaatacccaaatgcccccttctagatagttcttcaagcagaacagagttggcttccagttgatgattaatttaactcctgggcacactaaaagatattttcaagaactgcactgaagtaaaaaagaaaaaaaagaaggtataggaaaaagcttgtaaaaattcgagttcttgtttttacccatttctcaagaataattcaaatctattcttagagcaatgtttaatggaagtgacattatatgccttgctgcatttgccacctacgttacccacaagtgatttgagccaaattatcagtgattaatctaagagaatcaatatcatggatctgaatagaatgttttacagaaatagcatatgacaaggcattgaaataaaccagtttgggcttattaaaagaaatgtacaaggcaaagtcagtgaagtttaaagtaactggtaatagatattcaagaactagaaattaaagagaccatgaataggtcctgttttcctatgtgtcatctttgccttgggcacagctgtggagatgtcttcaggttttcatatttgtgtcctctctagaagggtcatttaagattatcaacctagaagtgtggcaatggctaaatggctactaggagttttcaatggatggaagatgctagtcagaatgtcagaaaatgaccttaaatggtgaaaccttaaagctatatttttcccaaaatggagtgacatcatctcatcctagcacatctcaaattttccctatttccctattccatcccctttgaacaacaccactctccggagacacagaaaaggaacctttttccctgtagcaagacagaattgatattggctcttcttattgagtccttgaatctacatagaataagtgtgccatcttttccacacggcagactctcaagtatttgaaaagaactatccccttcttttctgttccttttctcacatccatataaaaatatgcaaatgtatacaaattatcatattcactatgtaaaaacagtgttcataagaaagaatgaaagatgcgtactaaaatagagtagaggggatatggatattttttccctgtttctatttttcatatgttttctacatttgcgatgttgctttggtaatgggtaaaaaagggatacaaaacaaaaagaaaaattatctttccccctgaaaaaatgtaagcggaaaaagaagccaataaatgtgccgaatttttggcaccaaaagtgatcatataatgaagcattttcctcgtctccatcttaaaactgaggccaggagagatgaggagcagatcatggttactgctgtagatggagtaaacaatggactcaaaacgaagtcttctgacccccagtctagagttcactaatacacctacattggtttaaagcaacaggattgctgtttccattttcttagtccctgctcgttcgtgtttcttagattgcccttctagttttttgtttttcttatgacaaagattgttgttatgaaaattttgttcttgatttatcaaggaatggaatttggagagatggtcctgcttccctatatctctccttaaccttgggtacgtctgtggagatgtctaagggattttccatttttgtcttatcttgaagagccgttagtaaggacatcaacccagaaatttaaaaatggctgctgtaaatttgttcatggaaggatagtattaaagactttatataggtagaaagcaacagttcagaaaacttcctaacatttctgtattttgagttacagagatgcccattttaacgcccactttctagaatgtcaagtaataactaagactttatacataaccccatttgttccaacttaccaagcaaccgcagtttttcttttctttttttttttttttttttgaaagagtctcattgtgtcacccaggttggagtgcaatggcgtgatctcagctcactgcaacctctgcctcccgggttgaagcaattctcgtgcctcagcctcctgagtagctgagattacaggcgcctgtcaccacacccaactaatttttgtatttttagtagagacagggtttcaccatgttgttgaggctggtctggagctcctgatcttaggtgatccacccccctcgtcctcccaaagtgctgggattacaggcgtgagccaccgctcctggcctcacaactgcagattaacaaactcataggtctatcctgagaaggagtaaaacagcctgggttggagagcatcaatctatacagagatgctaccaccaccctgctggggacaaccctgaggcacatgctctacaccagctctcaggctttcctggatggattcaacccaagtggcccacagtcattaccactcaacaacacacccttttccttccctagctcacttccccacatctcaaccactgctttgtgggatcactttttaatatgttgctggcactcacaacttttttttagggtctgcttctggagaaactcaatctttgacaacctcttcacatactcacacacacctggtcatatatcccaaagacaagaagacatgttatcacatacaccagttagagctaatccagaagctaattcagaaataaatgcctcatctttccttgagcatagctgcacagggccctgacctgtccacattccactgaaatttgaccaggaggcaaatgacgtggggaaagaattaaacccatagatctcagcagcgcatctctagttattccataacccccttataggtgcgtcctcctccccactgtattatgaaacagctctatttaccaacttggatgaaagatagatttagcttgtcaatacagtgattgcaggcaactcaatggaactcacaagagaatggaactcacatagctataagctgcattgtgctaaatggtaacacactgcctttccccccacccccgaccttctcagagtgtgtcactttaagagtgattcacaggctgtttctctgaagtttcccattaaacacctgggtttggaaaaaagcgaacccagttgccattgagaaactttactaaatcagtccaaggacattactaaaaatgtcccagacttcctatataagagaaattcacctataaaaatcccaaaatgtgttgcctttgctgctctcatcatgctttggaatttatccccataagggcagagtttagggacctggatacaattttattaaaagatagactagcaacttaacaatgatgatgtagaaaaccccattcataggtgatatcctgaaccttcagcctctgagattggccactggacaatcagataagtagccagcagcctttagggagatctgaagggccttggaggtgggtttgaggcagcagtgtgtttatcaggcattcagagtgctcgaggcaatagccctttaccaccctgttgctgtacagaagtatttaaatagaacaactattttgaccatcctggtgggtgccaactgaatattatgccatgagtggtcatatctcggctctggtcagggtgactgacctccagcaggtattctccattccgtttctggttgctgccatatagtgtgagctggaaagtgacaatgacttaccagtgctgagtaacaaaagccagtttccttatctcaagagaagcaaaatcctagcgcaagccaggctgcagagctcccctgagatcaggctaaggttggggtttctaatattgtgatcttgcccggcttctgcccttcccttgccctgtctctcttccccatgtcctcaccagtatgtcttgggagtccacaaattctgacctcaagttctgattcttgaagacctgatctaacaaactttctaagtcacaggtttgggatttgttttttattttttattttctcgactctaaatcccatcgattccatttgttcctcttctgttcctcttaggagcctccattggtccctgttccacacaggtcttacttatttgtgttgtaatgtttgctttctgattcagagtctatgttccaattccagaggacattgtgtctccaagactgagttcagttttgaaaaatcaccaagcctgtttctattgctttagctatttctgttctgaattgttactgccaaattccaggcaaatgtggaactgccagagcatgatgtttcctccaaacaaatggtactcctatagtgtccttaaccaatgtaggaacatttttcatagttacagttatactgttacaaataacagtaaaaattatcatgtattgaacacttactaagtgtggtctccaacagggatgttttatgcattatttcatttaagtctcatagaaacactttaaggtgggtacaatttactgcaatatactttgggggaaacaaggcagagagggttaaggaacttggcaaatgtctcactactaccatgtgaaagaggcagactatgggctctaatctatctggtactaaagagtggttctaatcacactctggttgtgtctcctcatagggaagagttgggcaaagcttcctagcattggtgggacaaaggtaaagcccaggttacttttccaggtcacgaaaagccccttaggctcggcaaacctctgcctcttctttcccattatcaaggctattgctcttgttacagcagcccagaacacagctgttcattttctgccctgctggggtcctgctgtataatcatctgtcttaacccacgttttgttgtggtattaatgtaatgccacagaatgagtaaaataaaataaacagagatttatttggcttatggttctggaggctgagaagtccaagatcaactggctgcatctgtgagggccttcttgctgtgttataacatggtagaaggcgtcacacaggtgagagagaaaaaagagggccaaatgcatccttttaccaggaacctgttcctacaataactagcccactccagagataatgtcattaaagcattcgtgagggcagagccctggacctaatcacctcttaaagttcccgcttctcaattctgtttgcactgagcatccaacacatgaactttgggggaaacattcaaactatggcccccactctcatcaaatcacattattcctttatgtggttcaaatagccagccatttcattatcctcttctaagtttctcaaaaagaacagtcacacaaaaatatttcttagtaatgtagaattgactgaagcgagcattttaacaatgatttatacagggaacaatgcaacaagtctctttaggtgtaggggtcatctctctccttgaactttctgtatgcacactgctcagctgacctctgccccttctttctacaaaattattaaagttctcttccatcctttatgtgaatgtggaagaaggcttaaagctaaattccatgcaactttgttttggcttcttgcagagtctgaatgattaacttcgtacaagtagaaaacttaaatatataactttaccacaaaatagataaacttgtcaccaataatttggagaataaaaatgtcattgatattcaaaaaataaaaataaaaaataaataaataaattctatgcaactgccacatatcaaaggctgttttcagaagatacagttttcccaaaaaatgactttcttccatctcctgctaagatgatcattttttcctatgtgacatatgtaagttaagtagagcaatcaataccgggtagagagagcagccgtttttaccactgtcctggcccccagaaaatgcagatgagggaggtttgtggcttctcaaagccaagacaagatcttgccaactcttgagatgctctacatattaataaaaatgaaaaaaaaggtcaaaacaaagttcaaacgttgtggccaattggatgtatttatcttggaaaaaattctacaactttaatatgtacgtacaaatgtgtaacaatatgatgatgctattcgcagacagtagaagatttagttttagctgaaaaaaattgttacgtactacaagttttgtaatggtctgatcatgaatttgggtccagtactggaataaaagtctttttagtctgtgccagggtatcctcctgaccatatgcctatcttcatttggagaaaacatctagatctaaacttaagatctattgtgaatgtgaagccctactaaattgacctccctttcccctacctgctcctcattgcaatatcccttgagtaaggatcagtccaaatagctagatcaattcttatttgagtaagaacattccttccgtatacattgattactataatatatggatagctatagatacaaagacagagcattaaggggaaactatacagcctggctaaatgaatggagagacacatttacacagatgagttgctttcaggagtttccctgagcaatgaatcagtctgtccaattgctgctttcattcaattccataagtcctgaaaaacccccaccaataagcacactgccttgttgtgtgtgttgtatgtgcttgcagaatcacatcaatcttgaattaaggaaacaccttgcactgtacaatcccatggttgatgaagttacaaaacacattgagttacttgacaagaaattgccaccgaaaaataatgcaattgcaaccttaagccatcctaatgcagctcctcttaaaaaaaaaaatcatagtgctccgtagtttgtagtttccactggaaatagtggcatcaatatcttgtcagtgagaaattaaaagggacatgtcatccctttattctttatagactggaaatgacggagcttcttagatgaacaggcaccatctagctgtggagcatggtagatgaactccaaagatacaagtaacaattatttccctctctgtgccctcatgttattctcctcccctcaaaactgagttggccttaatgacttgcttgaccagtagaatgctatagaagtgacgttctggacttctgaggctaggtctctggaaaattccacttgggactttcggatacttctgcttggatgccaactctattctgtaagaagcccaagcaacatagaggggccacttgtagattttctagccagcagtgccagaggagctcccagtcaactgccgtccatgcagataaaccatcttagatgtccagcccaactaagccttcagatgaccatatcttgatgtgccatctgactacaactgcatgaaagacccaaggagagtgggtgtattacactgttgttttaagacactaaatgttagggtggtttgttacacaatagtaggaagagaagaggaggggaggagcaaaaaagaagtccctggaaggtctatcaaattataagacccaccttacacctaaaagacatatctcaagagaaaggatctaactaagggatctgtgttttgaaaaggtgtcccggattcagtgacttttggagaagacctagttaatgtggaacggggttgcagcttgcaaacctcacatattttaattactagataattgtgacacactctccttaaactaagaagcagtgacttcaatctgctcattttataaataatagactgagattgtaagtgattctatgaggttagaaatccttcaattggtataggcttcaaagttattttgagtcaattaaagctaatctttatttcatcctattttaaatgttgcctcttgatatggaatttaaatttgagggtttagactctcaaatttaggagctccctgaaccctcttatattttcattgtcatgcttttcatctgagtaattaaattttaaattctatcatgaagtaatcttgatttttatttttttttaatttgtagagttggcgtctcactctgttgcccaggctggagtgcagtggcacactcatagctcactgcagctttgaattcctgggctcaagtgatccttctgcctcagtctcctgagtagcaaggactataggtacacaccatcatacctagctaatttttatttttattttttatttttggtagagatgagatctcactgtgttgcccaggctcatcttgaacacctggcctcaagcagtcttcccaccttggcctcccaaaatgctgggattgtaggcatttgccactgcactaagcctggagtaagggtaatctttaaagtgaaagatgaactattactttattcttttttaaaattattttatataatttataacaagtgatacatctttattaacttcaattatgttaactttttggtttagattaacaggagtgggcaaatttgctatgaaggaccagagagtcaatattttagggtttgagggtcacatgtagagtttgaatgcccatgatgtacattcttccttttctttgctttttattttttgtcttttcttcttttttccttcatttttttttcctctttttataatcttttagaaatgtgaaaaacattcttagctccaggatgtacaaggctgtggttgctcttagttcacgggcatgaacagaagtttatatacagaatatacagtaggatgaaaaattaatgatatttcatgaataaaaggaactattattggtagaatatggttattgttattattaatatttttgacatgcctacatttgctttttattcctaggtttctcaacttatcctaatagggccaaatggaaaaagaaatatgttccaataacgtattttcaaaaatagtttacaaacgtgtttacctgtcaaacatttcctttcactgaaagaaaacagtttatgatgcatcttattcaaatattactttgaaaatgctggattaaacaaaattaagcaagtttatttattgcaggacttctcagggccttgaatatgtgactgtatgttgcggattccaagagatgaatgtagtactcagcatttcctaaaagcatttttaactttagaaatattatttgcaagatcattttaaggagatagtggtttccataaagcacttggaaacagcacttcttttatttgtgtaaatttaaggggtacaagtgtaattgtgttacatggctatattgtgtagcagtgaagtctgtgtttttagtgtgctcatcacccaaatagcgtaccttgtacccattaaataatgaaataaaatctgagttctaagaaaattagtgaggggtatgtgtgaactaacaagaagaaacagtgggctctggttagtgtgccaccgggaagcattgtttccctgctacaatttagtttctaaaaccatcctaggttaaatatctcccgtacactgctgtgaagcctatcttttcacaggaaagtctttggagaggtgcctgacagtttcttaaggatggtgggctgatgtttaggtcagaccaaaatagcattcacacttaggaactaactgccaacctggaaaattagctctctgaccagaaagttgctgaaaacctctctttctttttaatgtgcctgacaactttaaaatagaaactaataagaatgcttatttcccctgatgtgataaaaggctgataaaatgggaattaaaatgattgactaagatgtgaaattttgatattctcagctttggttgcccatggtattttttaacccctttacttagggtcatagatatttcactctactaatcgcacttttatttctttgaagctcttcattttgtcatttgagttacaagatagcgtaatggaaagaacacaggttgatgttgcaactcagttatgcattaataatgtgactttaaggaagtcacttaacttaactgaccttgttagttctctgtaaaattgatgtgataaaaaataacgtagcatatgaagagtttttatcatgtcatatacatagtagatggttaagaatggtttattttctctgctttctttctttacttccctgttgcctaattaactctcagttctaggcctgcacagcacaatatactttgagtagttcaaaaaaatcgacactataggaatgagttcatgatctgagatggtaagcagaggcagcagagggtttctttttggtatctacaaggatgtaccaaagctttgtgacaaacatccagaaattagtgatttccccagggtgagaaactgagttttaaaataataagtgatggaaatactggtttctgccaagcagctttctcacaaagaagactctatctttgtgagttatgcaacatcttaagagctttctacaagctctgaaaaccttccctgtcttttcctgtcagtcaaatattcctgccaatttccattattggaaggcagtagcacatttacagtcaagacacttccctatgcttcttttagcaattctgtggcacatgtttggaatttacatttttcgtatctccgactttatagaagctcaccaaggaaatacaaggtgcccaaatagctgtcaacaatgtttccaaaaatatgatttctgtatagttaacagattctccatggccattgctgagcaaaacttgaccagaaccaattcaagaaaagattagagaatccaggcaacccaattgccatagggggtgaaatatttcaaagacctgcctttccaaaacagcatcaagcacagatggtttcccagggcacttcgactaaactttgaaagaacagataattctaatgtttatcatcgtagctttgtctaaagcacaagaaaaaaagaaagaaaaacttcaaatttatttttttctttgaaaatactgtaacactgctaccaaaacctgacagtcaatacaataaaagaaaactctagatcaagtccataataaaaagtgatacaaaaatcccaataaaatgttagcagacaaaatgcagcagcacattaaaaaataacacagaataacaagatgggattcaatagaaaaatttaacaaggaatactaataaatgtattaatataatttatcatataaatagaccaaaagtggacattcatcaccataaattctacaaaatgcctttatagaatttatgatgataaatggcattatatatatatatacatatatatgtacacacatttataatgccacatatatgtcatacacacacataaaatgccatatatgcacacatatatgttaatttatatatatatacacacacacacaccatatcaaaatccactcttgatttaaaaaaccaatatgaagtagaaataaaataatgctatgaaatatgaatgattatagcctaaagtcagcaataggtttattggggaaatactaaacagcattctcattaatgttagcaataagacaaagatgctgctatcaccattattagataacattgctcaagaaataccagctaatataagaaaaatttaaaaattacagtgagaaaccaagaaatgaaataatcattgcagaagttcatatgagaaactggaatctaatttaaaacaaaaacaaacaattcaagaattcaaaaagtatctgggcacaaaaatataataatacacagactttaataaccttcatacatgcaaattatttgaagatatgatggaataagaaatgtcacataaagtaacaatcaaaaaaaggtacataaataaatttaacaaaaatatgagcaatctgttaaaaaatacattgtgacacaaaaacatggaaaaaaattccatgttcttagtatcataaagttattaagccctcctggcttaactataaattgagggtgatctaaataaaaagacaagtagtattctatttggaacaagataaattcactctaaacttcatatgaaaaaatgggcaagcaaaaataaccttgaatattaaggggcaacagtgagggtggaggattagggcaaacaaatactgaagtttattatatagccacagtaatttgaatattatacagccacagtaatttgcatgaatagtagtctgatgccctttccatccactctgattcagcatttcaattggcccaaactttgtctaatatggagttggcttttccatttgtccctcttgtttttccttcttgtttctagtgatttatgtagagagagggcatatggcagctaaatactgtcatcgtcaatctagaaatttctatttccttttgtgccttttgagcttttcaccatatacatatatcacttattaaaaataagtaggaatgattttttaaaacaaaataaggaaaggtcaaatatttagctttggttatttagcctttctaatttggtggtcacatgatctaacaaagtcctgaggtctcagagagatgaccacaaaaggcaaggaaagacttgattattcctgctttcaccttaacaaaaatgaaaacaaaagtggtccagactttaccactatgcaatttgtccacttagccaaaaaccgcttgtatgcctaagctactgaaagaaaaaaaaaaaaggaaaggaaaaggaagtgctcaggtttttcagtttatttgtgttctgactggaagatgtcaataagaatgtgttctgctgttaagtgtttgagacccattgaaacactgtctctgcagtttatgacaccatggatgcacttaaaggtaaatgtttcccctgtgtatatggctgctgagcataaaacataatttcactattttaaattctttgtatgatgtatcatttttatgtattcactacagcaattgttcataattttttagagttactcaatactgagtccttgatgggaaatgcaacccttaattttactactattgctttagaaactttatttggattcctgttcatctagttcatttactattggggcttccctgaatacctgctggtgaaattgagaagttccctttttaatgcttaaattttggaagaaaatctatggtccagtaagatacacagtgaagtgataagttgcagtggcctgctccataatttattaatattcggcttagttgcttcagcaaataactatacatttactttatactgacataaagacaacacattatggatccagaatttcatagtttgctatgttctggggaaatatgccttgaaggcttcttaagtcaaagttaaaatataattgatagaactcagcagtttcaatcaaagaatgagtgttgtgatatggattgcaaatcagaaaagtaaaggtgagtaaaatttgctctgaatgtataagttttccaattgttatctcttaatcctccaataggtgtggagtccagagtcacacagggaaatggagtgcaagatggggttcacagatacagttcttttgattccttctcaaatgctaaaggccctagatttgatgttgcagttaaggactaaagaaaaggcagatgaggtggcatatcatctcctctgcattttatattactagtgtctcatgcctgtactctcagcactttgggaggccaacgtgggaggactgcttgagcccaggagtatgagaccagcctgggcaacatggtgaggccatgcctctattatatattttttttaaatgttaaaagaattcacaacttatgacttgaaggtgggtggcatgtcagaaatggctatatttggtcaggtacggtggctcacacctgtaatcccaggactttgggaggccgaggcaggaggatcacctgaggtcaggagttcgagaccagcctggccaacatggtgaaacctcatctctactaaaaatgcaaaaattatccctttgtggtggtgagcgcctgtaatcccagctacttgggagactgaggcaggagaattgcttgaactcaggaggcggaggttgcagtgagcagagatcacaccattgcactccagcctggataccaagagtgaaactccatctcaaaaaaaaaaaaagaaagaaagaaacggctacattcttcattaactgaaaaaaaaaaaaaagaaaaagaaaagtaggaaagaaaaacaccagagctgatcaatattggatttacttcaaaattccctggtgctagggttttagataactgtcttcctttattcctgattccttcagcaaacatcttttgagcttccatcatgtggaactgcctacaaagtgcaggagaccagatgattaaacgcatcatggttcttgccttctaagtatcccacagtctggtgatggagacagacatggtatcacttcataaagaaagaactggcggttttcttaggaccccacaaagtgtgtgtgtggaggagggcagctatgatgggatctgctgggggtggttagggaaggcatcccaaaaaattaaagaaaagctgcatttagaagacatagacatgtgatatcaagaaacatcttgggccaaggctaaacaactacacagagatctctttgattgtccaattaggcagagacacaggagtatgtgcagaagtgagaggaacaggacccaactgagatctccagcctggcctatacaatcttgtggcagaaagttaagggagcccatggggtctgattttcttcctctccctttggaaggcagagaggaaaacagcagggtttctttattcccccaattagtggtaaattgtattgctgaaactctctgacacatgcctaccacactagcctagagttacatcagttttaacttctggtactaatatcagcaagagacaaagggagagagagagagagagaaaaaaaagagtatttcatttgactattctttgatcaccacctgcaataacaaccttgggggagctttagcatttgatgagaaatctgcagattcagaaatgctatgtctgcaaattcaatcatgtactcagtttcgttgtgtgactctgggcttcacacatacttggtaattataaagcagcaactggaaaacctataaactcagagcaaatttcatccacttttaattttctgattttcagtctacatcacaatattcactctttggttaaaaatgttgtactctacaaattatatttttgcagatcatctttcttaaaacacgcattcagcattttcatcttagaagctactccacattaagtaacaccatttctgcaaaccgtaactttaatcaccatttctcaaaatacgtaaattcactgttcatggtggatttacttaatcaagtatccatggtatgtgagtgtgtttgcgtgcatgtgtataggttgtacattgcatttcattgacattcttctcggcacttagaaaaggggttgtttgcacatagtaggaatttaataagttgaaaatatgaaggacatggtattcccactaaaaggatgtaatcattttggattaaatgtgaataaccatctggatctacaatcagccatccagggtagacacccaggtgttatcaacctaccacctgcaatgaagagagggcattggaggggcgattcaaatcagtttccacttttttaaacaggaattaaaatagaaatgtattttgtcagactggaaaatgccattttgaaaaccataattgtgaactgcattttcccaacaagttatgatggtagacacccacaaacagctgtttgtggcttccttgagtataggaacaacacaagaaagaaacaagctaacagtgtatatagtctctcccaggtgctctagccaccacctccagcaagcctggaaaccagctgacctgtgaaagtccagccaagtgactgcttcagaagtgattagagatggccaataaccgcctctcaggagttctgctgaactcagctaatgccactttgcttggaatttaaatcaaattgtattctgtccattaggagataaagaaacaaatgtatcttaaacctgtcttgtctctttcttctcatcactctccccactaccttggccaagattttttttttttaagataatgggaaaacagtctgcatttattgcttcaggtgctgagttcagacaaaacttttcctttgtccactgggatggctttcatgtttggaaagaactcttgaaaatgcagaattagcccatctgttccattttcagttttctgtggagactctgcttattctgtctttcatagactctggttccaaactatactcatgttataaccattgtcgtctcctatatctgtacttacatacttccctgttcaataaattgctactgaaacaatgagaaaaatctaaaaccgtaaaactgactactttcatttgctttttcattctataatgcagttgttctggaaatgatgcagaagggctggaccccggctaaaccccactcttaagcctggaaccatggccctaagtgaaaacagctgaccccatttttctgtgcaaatgttgcctttttggcctgccccgcccctatcttgtgcccataaaagacttcagctggcagagcaatactagcggctgagctttgaagatacaagtggctgagtgttggagactacagacagacaaagctaacttcagaatgtacagcttcggaaaggggcccagctggaaatagccgggcttcagaggaagatcaccctcccttcccctttccagtctccctttctgctgagagccacccaccgctcagtaaagtcttccacattcatcacctttcaaacattcctatgacctgattcttcctggatgtcggacaagaacccaggtgccaagagggcaggggctgccaccctgaccctccactgagccagttgacacttggccatccctagatggcagctgaaagagctttggttgtaacacacttggaggctgccgtgaggtctgcacagagcctgctcccaccagagaggagccactgactggttctagcattcattcactctggttcctgcagtcccttgctcacatactccctcctgtgaggaatggccagcagcagactatgatatgagccactccagttccagcctgtgaagggggtcaagggaactatcccatctcagtacagtattatatagttacaaattttcggagtatcttaactgagaagaaaatggcattgttttccataccaattagaataagaaatgcttgcaaagaatgacagtaaaggtgtggtggctcatgcctgtaatcccagcactttgggaaccaaagtgggcagatcccttgttgcccaggcttggcaacatagcaagaccttgtctctacaaaaaatacaaaaaaaattagccaagcatggtgatgcatgcctatagtctcagctacccaggaggctgaggtcggaagatcacctgaactcaggatcgggggtgagtcaaggctgcagtgagtgagccgtgatgacgccgctgtgctccagcctgggtgacagagtgagaccctatctcaaaaataaataaataaatagtattacatcttaaaagctttacaaatgctttcatacaaatgtaaatttcttacaggagagtccatctaaagagtacctgtatgttcattaaaataatctaaagaatttaaaagtcgttacctctaataaatgatatctttgccctcagtgtgtaaaattatgtttagttatttgaatattttgtttaaaaatacttctctacctgttgtagtgtatataggctaagtaatttagtaataaagcattgttttagaaactcaatttgggaaatttccagttgtatgattagtgtgtttctattaacacatgataggacctttagttaactgtaacgggcagcatttattgcttgcttagtgtgtggaacatcttgtcctagacattgtacttgtattaattggtttattttcatatcaactttctgaagtacatgttattatttgatccattttatagatgaataatttgagacacaaaagggttaaatagcccaggtgcagtggctcaagcctgtaatcccagcactttgggaggctgaagcgggtggatcactaggtcaggagtttgagaccagcttgcccaacatggtgaaaccccgtctctactaaaaatgcaaaaattagctgggtgtgggggcgtacccctgtaatcccagctacttgggaggctgaggcagaagaattgcttaaactcgggaagtagaggctgcagtgagccaagattgcaccacaagaaaaaaaaagggttaaataatccacaaaagttctcatggacagcaagtgtccacgtggtatagagtcctaatttttccagtcttagcctgtgctgttatccactctaatatgctgtgttctctatgcagccttgctaaggagtgacctgcagtcattaccatttgttggctctttagagtgatataaggaatgcctctgttgaggaggctaattgtcctaggactctgggtttctgctaccaggaaaatatatatacacatttaaaaaaaaaaatggaagcatgagatttctaattctttattttgctttgggaaagtatttttctaaaaaaaaaaaaaaaaaatacccacccattaaattgtcacataaaggagagaaaattttaatgtcaaaatgttgagaagatatcaaactagatttagctttacaagaattttactacactgcctttttgtttctctttctgccgtggactagaaaaagttgtcacagtttaacattggcccataaacccattctcaaaattttctgctctagagtatatcgtctacattgtcttttgctctcttcctccttcttaatcttcttcttccccttgtcctcctcttacctttctcctcctccttcccttctttttccttacttgtcccctactggtagtcatcaaggatttggtcaaatagaagccaacaggaagaaagaaaggatcagggcttggaaaacctacatgcttaataaccattctgtggctatttaaaaattaataatagtgggtggttattattaacccagtactgtccctcgctcttgaatcaatgtatcaaatgttctcactgtcaggcctctgagcccaagccaagccatcacatcccctgtgacttggacatacacgcccacatggcctgaagtaactgaagaatcacaaaagagtgtgaatatgccctgccccaccttaactgatgacattctaccacaaaagaagtgtaaatggccggtccttgccttaagtgatgacattaccttgtgaaagtccttttcctggctcatcctggctcaaaatcacccccactgagcaccttgtgaccacactctgcccgccagagaacaacccacctttgactataattttcctttacctacccaaatcctataaaatggccccacccctatctcccttcgctgactctcttttcagactcagcccacctgcgcccaggtgattaaaagctttattgctcgcacaaagcctgtttggtggtctcttcacacagatgcgcatgaaactcacattcctgtaatttttttttttttttggctccctctctttgctttatcttcccatgtgcaggatatcctcctgccctttccaaactcatcccaatctccaaagcccttttctgatatcagttccttcatcaaaatgccaccatctgtagcacaccctgccactgcctcctgtttctcttctgcactgaccctccttgctcctcatataaggtaaatcggaagcatattccacatcatttcctggagcttcccaatgagattgagctcccattgtccccagtgataatttacttaaaaactcatgctttatcaatatcccctcatgcttcagtgtttcctgggagtgctttcccaataaaccacttgctcttggatcctcatctcagaatttgcttctaggaaaattaactaagatagtatctgtcaggcctctgagcccaagccaagccatcacatcccctgtgacttgcacgcatatataagcccagatggcctgaagtaactgaagaatcacaaaagaagtgaatatgccctgccctaccttaactgatgacattccaccacaaaagaagtgtaaatgcctggttcttgccttaagtgatgacattaccttgtgaaagtccttttcctggcacatcctggctcaaaaagcacccccaatgagcaccttgcgacccccactcctgcccgccagagaacaaaccccatttgactgtaattttcctttacctacccaaatcctataaaacggccccacccttatctcccttcgctgactctctttttggactcagcccacctgcacccaggtgaaataaacagccatgttgctcacacaaagcctgtttggtggtctcttcacacggacgcacatgaaatttggtgccatgactctgatcgggggacctcccttgggagatcaatcccctgtcctcctgttcttcgctctgtgagaaagatccacctacgacctcaggtcctcagaccgaccagcccaaggaatatctcaccaattttaaatctggtaagcggcctctttttactctcttctccaacctccctcactatccctcaacctctttctcctttcaatcttggcgccacacttcaatctctcccttaatttcaattcctttcattttcggggagagacaaaggagacacgttttatccgtggacccaaaactccagcgccggtcacggactgggaaggcagccttcccttggtgtttaatcatggcagggatgcctgattattcatccatgtttcaaaggtgtcagaccacacagggacgcctgccttggtccttcgcccttagcggcaagtcccgcttttctggggaaggggcaagtaccccaaccccttctctgcttttctgggcaaggggcaagtaccataacgccttctctccttgtctctaccccttctctgctttcctggggcaagggcaagtttccctcaaccccttctccttcacccttagtggcaagtcccgcttttctgggggggcaagaatccccaatcccttatttccgcaccccaacctcgcatctctgcccctcgatcccttatttcggtgccccgaccccttacttctgtgccccatcccttatttctgccccccgacctcttatctctgcaccccaaccccttttcccacttttttggaaggtaagaacccccgaaccccttccctccgtttctatactctctcttttctctaggcttgcttccttcactataggcaaccttccaccctccattcctccttctactcccttggcctgtgttctcaaaaacttaaaacctcttcaactcacacctgacctaaaacctaaatgccttattttcttctgcaatgctgcttgaccccaatacaaactcgacagtagttccaaatagccagaaaatggcactttgaatttttccatcctgcaagatctaaataattcttgtcgtaaaataggcaaacagtctgaggtgcctgacgtccaggcattcttttacacatgagtcccttcctagtctctgtgtccagtgcaactcatcccaaatcttccttctttccctcccacctgtcccctcagtaccaaccccaagcgtcactgagtctttctaatcttccttttctacagacccatctgacctctcccctcttggccaggccgagctaggtcccaattcttcctcagcccctcctcctccaccctataatctttttatcacctcccctcctcacaaccctggtccagcttacagtttcattccgtgactagccctcccccacctgcccagcaatttactcttaaaaaggtggctggagccaaaggcatagtcaaggttaatgctcctttttctttatcccaaatcagatagcgtttaggctctttttcatcaaatataaaagtccagcccagttcatgacttgtttggcagcaatcctgagaaactttacagccctagaccctaaaaggtcaaaaggccgtcttattctcaaaatacattttattacccaatctgctcccgacattaaataaaactccaaaaattaaattccagccctcaaaccccacaacagcatttaattaacctcgccttcaaggtgtacaataatagaaaaaagttgcaattccttgcctccactgtgagacaaaccccagccacatctccggcacacaagaatttccaaaagcctgaaccgcagcagccaggcgttcctccagaacctcctcccacaggagcttgctacacatgccagaaatctggccattgggccaaggaatgcccgcagcccgggattcctcctaagccgcgtcccatctgtgtgggaccccactgaaaatcggactgttcaactcacttagcagccactcccagagcccctggaactctggcccaaggctctccgactgactccttcccagatcatctcggcttagcggctgaagactgacactgcccgatggcctcagaagccccctagaccatcacggacactgagcttccggtaactctcacagtggaaggtaagcccgtccccttcttaatcaatacagaggctacacactccacattaccttcttttcaagggcctgtttcccttgcctccataactgttgtgggtattgacggccaggcttctaaacctcttaaaactccccaacgctggtgccaacttagacaatactcttttaagcactcctttttagttatccccacctgcccagttcccttattaggccgagacactttaactaaattatctgcttccctgactattcctggactacagctgtatctcattgctgcccttcttcccaatccaaagcctcctttgcatcctcctcttctatcccccaccttaacccacaagtataagatacctctactccctccttggcgaccgattatgcaccccttaccatctcattaaaacctaatcacccttaccccaccaaacgccaatataccatcccgcagcacgctttaaaaagattaaagcctgttatcactcgcctgctacagcatggccttttaaagcctataaactctccttacaattcccccattttacctgtcctaaaaccagacaagccttacaagttagttcaggatctgcgccttatcgaccaaattgttttgcctatccaccccgtggtgccaaacccatatactctcctatcctcaatacctgtctctacaacccattattctgttctagatctcaaacatgctttctttactattcctttgcacccttaatcccagcctctcttcactttcacttggactgaccctgacacccatcaagctcagcaaattacctaggctgtactgccacaaagcttcacagacagcccccattacttcaatcaagcccaaatttcttccccatctgttacctatctcggcataattctcataaaaatacatgtgctctccctgccaatcgtgtccgactgatctctcaaaccccagcaccttctacaagacaacaactcctttccttcctaggcatggttagcacagacagaattcttacgcaagagccaggaccacaccgtgtagcctttctgtccaaacaacttgaccttactgttttagcctagccctcatgtctgcgtgcagcggctgccgctgctttaatattgttagaggccctaaaaatcacaaaccattctcaactcactctctacatttctcataacttccaaaatctattttctcctcatacctgatgcatatactttctgcttcccggctccttcagctgtactcactctttgttgagtctcccacaattaccattgttcccggcccagacttcaatccggcctcccacattattcctgataccacacctgacctccatgactgtatctctctgatccacctgacattcaccccatttccccaaatttcctggtttcccgttcctcaccctgatcacgcttgatttattgatggcggttccaccaggcctaatcgccacacaccagcaaaggcaggttatgctatagtacaagccactagcccgcctcttagaacctctcatttcctttccatcatggaaatctatcctcaaggaaataacttctcagtgttccatttgctattctactactcctcagggattattcaggccccctcccttccctacacatcaagctcgaggatttgccccaacccaggactggcaaattagcttttctaaacatgtcctgagtcaggaaactaaaatacctcttagtctaaatagacactttcactgaataagtaaaggcctttcctacagggtctgagaaggccaccacagtcatttcttcccttctgtcaggcataattcctcagtttagccttcccacctctatacagtctgataacagaccagcctttattagtcaaatcagccgagcagtttttcaggctcttagtattcagtgaaacctttatatcccttacggtcctccgtcttcaagaaaagtagaacggactaaaggtcttttaaaaacacacctcaccaagctcagccaccaacttaaaaaggactggacaatacttttaccacttttgcttctcagaattcaggcctgtcctcagaatgctacaaggtacatcccgtttaagctcctgtatagacgcctttttattaggccccagtctcattccagacaccagaccaacttagactgtgcccccccaaaaaaacttgtcatccctactatcttctgtctagtcatactcctattcaccgttctcaactacccatacatgccctgctcttgtttacactgccagtttacactgtttttccaagccatcacagctgatatctcctggtgctatccccaaactgccactcttaactcttgaagtaaataaataatctttgctggcagaactatgctgaatctccttaggcactccctaatcagatatcctgagtcatcccaattcttagaccttttacacctgtttttctccttctgttattccatttagtttctcaattcatccaaaaccgtatccaggccatcacctatcattctatacgacaaacgtttcttctaacatccccacaatatcaccccttaccacaagacctcccttcagcttaatctctcccactctaggttcccacgccgcccctaatcccgcttgaagcagcccttagaaacatcgcccattctctctccataccaccccccaaaaattttcgccgccccaacatttcaacaccattttgttttatttttcttattaatataagaaggcaggaatgtcaggcctctgagcccaagccaagccatcgcatcccctgtgacttgcacgcatatataagcccaggtggcctgaagtaactgaagaatcacaaaagaagtgaatatgccctgccccaccttaactgatgacattccaccacaaaagaagtgtaaatggccggtccttgccttaactgatgacattaccttgtgaaagtccttttcctggctcatcctggctcaaaaagcacccccactgagcaccttgcgacccccactcctgcctgccagagaacaaaccccctttgactgtaattttcctttacctacccaaatcctataaaacggccccacccttatctcccttcactgactctcttttcggactcagcctgcctgcacccaggtgaaataaacagccatgttgctcacacaaagcctgtttggtggtctcttcacacggacgcacatgaaagtatctgtatgagtcagatttcatgctgctgataaagacatacccgagactgggaagaaaaagaggtttagttggacttacagttccacatggctggggaggtctcagaatcatggcaggaggcaaaaggcacttcttacatggtggcagcaagagaaaatgaggaagaagcaaaagcagaaacccctgataaacccatcagatctcctgagctttattcactatcacaggaatgaccagcccccatgattcaattacctccccctggttccctcccacaacacgtgggaattctgggagatacaattcaagttgagattcgggtggagatccagccaaaccatatcattatcttaattgacatcagtgtcccggtggtcttctgccagtgaatgatacctactattactaaagtatgtccctcaaagatgagtgccatagcaaaagacctttgtaaaataataaaaaaaaaaaaactgctctcctacgggagctgaacagaagtctacaaaataggctggggctcaccctgaccttcctttaactaccacaaatcactcctctttgctgagtaacttaccattgcctctcaattttgtttcatttcaggcattacacctaaaagtaatttgagcaccttgagcttagagcctaccttggctaatgtgaaacactccagctgtgctaagatggtcctcaatagtcaacaagcacttctgaaagtctggtaggtgtgtgcatttgaatgaatcctcagtcttctctaattctgtctggaaggattcattaaaggcctttctcatgtcttgattaattgcccttcaaggataaattttcacgacatatagaagccgtttttatctacagcatcaattttactgctataaatgagcaaaatgagtgtcccatctctggacatacctggttatgcaagaacttaacatcccctgatgctttgtgaaaagaacatttaagatcttttgcccatgtaaaatggaatccatctattaaaattgtaccttgaattgctaagtttgaaaagatcatacaatatctcatctttggtttttgaactgcagaaagttaatctgaaatagttcaatttgggtagtagaatttccaaaagctgcccaaaagacaaaatctatttgaaaaaagaaaaaaaaccagcaaagtgggaacaggttaagttgtctttcctttcctttggtcagtatcattcagtttggattataatccatgatttctgaaatataacccacttcatttgcccttaaagactaagacctctattaaaagcagagcatttcttgtcattctttccattgtattgaccactgagcgattcattaacaattgatctgcatctccttaaaggaaaaaaaaaaccaggtcaataggaagtcaatctgttgagaaggaatagaggaaatatgtgatgcagcaaggcacatctgtaataagactggagggatgtaggcaatggagagaacagtgacatggcccctacaaaaatccaatttctgaagtcagacaaacagactaaactagagtttaacacagacaaacctttatgctagaaaagtttatttgccacctattcctgatttagccattgtgatttctcttttgcatagtgttttgaatggaaattcacaggttacaatgttaagaagttactaaagaacaattgaggacaacataactgaaaatggggtggtaaaaagaactgttaaactatttctttgagccttagtaaaccatttcccacaattattctaaattcaaattggtcactgatgacaaataagcaatactttcaaacaagttttgttctcctgtctaaaactctatttaacatttgagatagtcattagctaaaatagattctctgactcaaggcaacattaccttctgctagccttggcattagagtggttggaagaaggaggcttcatgttctgcagttgtcagaagaaaacaaaccacttaaatttataacaagttaccagctagaatctgttgtaataatcacagtcttttgtgaaaatcaatgaagtgcatggcattttaattcactatctctgatcctcaaggcaaccaagcaagttggtattatgattactctgtcttagatagaaatcaaggttcaaagaagttacatgtgccccacatcgaatagctcataaatcctaaagttaatattggaagtcaagtcttactatttcaaaactcatgctcaatctactgctaacctgtagtcgtctagctttaatttataatatacaataaaaccttacctggaactctaataagtaaaccagataaaataaaagaggctctggttgaattgggaggagaaagcctggagcttgactacttagattccttccccttttcccaaccctctctgtagcagcccccagtgctctgctctgtagcactgggggtggctacagagaggctctgtaggaaaccctatagttggccttctgttggggctcttcccagcaacatcttgctccataaacacaagcacctgtatgcatatcaggggtcagtcacaaactcggatgcttacaggtgccccaaacacaatcctgctgcacctttggagtgatggaagtttcttttcattccctagccatgagttttaaagttattggtctctcaaccaatggggtttttttaattgaattttaatttctgaatccaaattccaaactcagaatactgaggaatgatattaatagaaggccatggaaacatacgatagtcaataaaaagagaaagatctcatttaataaacatggtacataacctataaacttgacattctgcatttttgtatactgcaaacccatatacggtatatgtgctatgtgtatttcaaagtatagtatgcatgtacccaaacgtaaacagtcaaattaaattcctctaatatttctgtatgtattaaatgattttttgtaaaaaaaaaaaaaaaaaaagaaactatctgctaagaaattctcccctgacaatgctactcagggcagaatgatgttattttaaattcttctctcattaaaagaaaaaagagtttgcttcttcagagtttgtgtgtatttataccagagcttaactggcattttcattgtggtgtttatgaatcgtgatgcagttccactgcagctcctgacacactcattaatttgttcccagcggcagttcattaccaacatcacaagcaaaacatgcgctctccctgggcattgaaggtccaccggaaattaagcagacggggctgcaaagcacctcagagtgaagccagccagcttcatctgctgcagcaggctggaggcaagcacaaggagcggcaggaatgaaaggcttcagcgccttccctggtgtctctgtgccttctgagttttcagctgacatggagcagtgattccctgaaaaggatgggatcttgctccctcaaagatcagccttctttgatgagcctgctccaggtggagtggagcaaccactttagctttttagtgcagagaagacttaggaagtttcattttccttgactggggttctgctttctgtactgacccttcctggtcagtggggagctcggagctctgagttggagcaccttaccaaaatcttctctgagtggggttaagtaagccagcagactctgcaagaacagagccttgctgaatttagctttccagaaagccctattttaagggaactcagtatttcagcaagatgctggattagggggagaaaacaagtagtctgttaattctttgttgttgtcagcagccttgcaggttcctggaccatgacacatcagcacagtcctaagtaacagaagactcaggtcctcaccatgacctcaaacagcatgatctctgtgaatctcagtaaatcattctgagcttcactttccttgttcacaccatatagctatttatatctgctccacatgatgggcaaggtcactgggaagtgtagattatataaggcatgggaatggcttcacaggttcatgtgggacatcacatggtgaggcacagagatcagaaggtttgggttcaaatcagctctgccgagctggagaaaccatgttagtacttgaccctggtgtttcaaactcaaaatcagaataagattagggataggaaaaagaccacacgagatacttctgagttttaaatgatttatttgaatgaggtcaactttcgttcacttctaaaggaagatagaagtgtgagttttgtaattagcctagagaaccgggggagcaagaccctactgaacaagcctcctccagagctcgccccaaagtctggagtgcaaaatgtccacctcgttatgattaatgaagcctctggatatagatcagaagactagaaatgtctgtgaaaggagctcttccaggggctcagccaaaaccaggagaattgccctcgactcctctctttccttgtttctaagccatcggcaattttgctcagctccatcgtcaggaagtcccaaatcagaccactgctccctgattccacagcttccgtcctggtccaggctccataatctccccctgaacctctgaaagagcctcttaagcagactcctgccgctccccacccttgcttctcttgtctgtttcttcaagcagccaaagggatccctgttaaaatgttaagtgcaatctcatcagcctctgttcaaaaccctcagatggctttaagcagagtaaaatccataattctcaccacagccagggggaccttggtgacctcattcctccatgagggtatctccctccactctcctcatcccgttttctgttccagatgcactgaccatctagtcctacctgggaacatgaacaccaggaatgctgctgcctgggaagactttcactttctgttctttctgcctgaaacactccttcctgggaatccacattaatccatattctttctttgctagagtctgactgaaatatcatctgtgcagagaggcctatcttaccaccctattttaaataatacatgtatgtgtacgcacacccatgtgtatgcactctccatctccttacttgctttatttttctttattcactcatcatcttcttctatacatccattcatttactcttctatcgtctgttttatactcctgcccttgattagaatataaatttcctaagagtacagacttggtctgtttgattcactcttccagtgcccaaaatagtgtctgacacatatcaattatttaataattatttgcagatatgacagcatgaatgaattagatcagataatctaagaactgttttgcagtcatcacagggcactgtaataaagccattagaaaaataattaattgagcttgatgatgtagcaggtagtcatgactgtagctggcaggtcccagaagatagtcacattaactatgttgtcatgagaacaagcctaggttgtaaggctaaatcttctacgatgttgtagagaggcaacctcccccacagcaggaaaagccacccctttaatattcattatgaagcaaagagactaagtgaataatttacatgctacctgtgttctcctccatgctagccctgatatattttcaatattccattcctcttgctccctcagctctgtttcaggcagcaatttcatgccacgcagaatatgaatctaacaggtgaatttccatccagggtccaattctcttactactgatgtggagaaaaccgtaaacaaagccacagtaaagcctcctttttgaggctgagtaaagccagatgaaaggcaagagagactcagcaaaacatatttaggagatgggaaaataaataaattcctttaaaagttgcataatgttcaatagcatgtatccactgttacgtattcaatctttaccttgttgatgcattttccagcttacttttcattttcttcctcggcaaagctgcaataaacattctcctatatatatcattaccttcttgtgttttgatttctgtaggcaacattccgtaaagtgggatggcatggacaaagggtatcaatatatttaattttaagccatatttctaggtaattttcccaaatgggttagcaacttactctcccaccagaaatgtatggcagtggctccttgccttgctacactccccctacaagaaaagctaatctcatcccattggattgtaattatgatgactgaaaaaatggtaattcatttgtaatttgcaatttcctgcatatggttaagcatcttattggactcatgtatattatttttaattttaacaattgaaggagttatttgaacagcagtaccagtaacctttatcatgtcatttctgttgtagttatgttaacaatctatacggtttacatttccactttactaatgatacattcgacatattactttggtatttagatagtcaaatatttccatttcgtgatggtttctgagattcctgccctggttaagaatgccccatgacctcaaggttatgaaagtattcccctgtaatttgttccaagattattatttttgtttttatttaggtcttttatctatctgaaatttacatatgtatgtggagtgaggaaaggacctcatgttttcttccatataggtagcaattatttcagcatggtattatttcttccatataagtagcaattatttcagcaatcatttcagcatatagacaggaaactattctgagtaaaaatgcactcttggtcaaataataaattccctatacacctggatgtaattttccaagtgctctgacagaagcagcttcccagagagccattaagattacctgaaataaaatgtaatttgctggcagaatctgaccagatggtggtccatacactttgtcaaacttctaagcagaaagttctccatcttagctttaatgtaatccaggatccttgatcagacacacccattgggcccacactatgcatcagaaacttttctaaatactttttacagattacttcttttatgccttaaataaatcctataaggcaagtattacttttatccccattttctgtattttaagtacagaaaattaggccaaggctggatggcttgtgcctgtaatcccagcactttgagaggctgaagtgggtggatcacttgagataggagttcgagaccagcctggccaacatggtgaaaccccgtccttactaaaaacacaaaaattagctggatgtggtggggtgtgactgtagtcccagctactcaggaggcagaggtggaggtgagacaatcgcttgaacctcggaggcggaggttgcagtgagtgcagtgagccaaatggcaccactgcactccagcctgggagacagagtgagattccatctaaaacaacaacaacaacaacaacaacaaacttaacaaacttaaaattagttgcctaagatcacaaaacatggtcaatgttggggctgagatttatagcttccagtgtaaccagggtgaccccaggagctggattctgttgaggatgcttttttgtttttgtatcttaaacattccacttatcacaacacagaaggtacacagatagacctggaaaaaaacactttttatactatagaatcttattagaaaataatgacttgaaatgagtttgcttcttgaaaaccttgagtaatttcaaaatagtgtaatttcagtaactgcaaaggaacagctctaatgagttctgctccagaatcttcttctcaccaggaaatgattgaagacaaggagataacctctcattaaatccttattaactattttaatcaggattacatcactgtctcactccaagcacggacaattgccagcaggctatggcgctgaaatttattaaactgacaaggtggaaaggtctggacagccggaggggtcgtctctgtgccccggggagtctcatttggtgaagatctgactccctcatttctcaatagcgatctacacttttggtttcttgccacacgtccctcaaaagcccagcagaaatggcttccatcaatgagttctcaaatgtctgcgctgtggctgggagctgaaagccttatagggagagaaggcctgctgatccaagcaagcagtcaatcagctcctacaatgggatggagcccccacgcagcatggcacatggagtcttccccacttcccaaggtcacagaggattcagcctgttcaggcccatcactctgccagagggactgactttcccccaccgcctcaaggttcagggaacctgcggcatatctgtaggggagtccatcccaccccagtgacaatcgccaagccctgcaacttgagagtcctctgtagtgaacattacagctttcactctacttaagagctctaggaggaagtcctggctgctatttttgtccatgcaatgtggacagggaaggatacagcaactttttttttttttcttttttgagacaaagtctcactctgtcacccaagctggagtgcagtggcgcgatctaggctcactgcaacctccgcctcccgggttcaagcgattctcctgcctcagcctcctgagtagctaggattacaggtgcccgtcaccacgccgggctaatttttgtatttttagtagagacgcagtttcaccatgttgaccacgctggtctcaaactcctgacctcaggtgatccacccgccttggcctcccaaagtgctgggattacaggcgtgagccacccacccggccagtatactgcaactttgggatgcctctctggactcaggcctgagcagcccagcccacggccacaggcattggttcactaattgatgcacatgggccaatcagagccaatgagatgcaaaaggccttctggatgatcacgtgaggtagtagatcacgtgggagatcatgtgagcatagcctggagagcctcagcttgaactgaggtcccttctctcccacttactaggcctgtagccttagaatgttatttagcctatttatcacatttgccaatttccatggtgtgactacacccgccatggtcagtttcaacttaccaacataagtgaacgcagatttggtaaaaagatgtgcagtagtacaacattatgtagaatttttaatctccagatacaataggtgaaaattaccacaagcacacagataagaataaaatgtaataaagcaattagaaagtgatgaggattgagtattgcacttgttttcaatatgatgaatttaattataagtttatataatttaattagtgcctgtttccttttaagaccatttctcaaaatttttggaaatttaagagttggctctcattcctatacagcaacaacagtcaacctgagagccaagtcaggaatgcaataccattcacaattgccacaacaaaaataaaataaaatacctaggaatacagctaaccagggaggtgagagatctctacaatgagaacaacaaaacactgcttggagaaattagagatgacaaaaacaaatgagaaaacatcccacactcatggagaggaagaatcaatgtcattaaaatggccatacttcccaaaacagtttatagattcaatgctattcctatcaaactaccaatgacattctttacagaactagaaaaaaactatttaaaattcatatggaatgaaaaaagagcccaaacagccaaggtgatcttaagcaaaaagaataaagctggaaacatcatgctactggacttcaaactatactgcagggctgcagtaaccaaaacaacagaatactggtacaaaaacagatacatacaccaatggaacagaatagagaacccagaaataagactgcacgcctacaactatctgatcttcaacaaagctgacagaaacaagcaataggggaaggattccctacttaataaatgttgctgggatatctggctagtcatatgcagaagattgaaactggacccctttcttttaatacatacgtaaatcaactcaagatggatttaaaacttaaatgtaaaactcaaaactgtaaaaaccctggaaaacagcctagtcaataccattatggacaaaagaataaccaaagatttcatgatgaagactccaaaagcaattgcaatggaagcaaaaattgacaaatgggatctaattaaaacaaagagcttctgcacagcaaatgaaaccatcaacagagtacatagacaacctacagaatgggagaaaatttttgcaaactatgcatctaacgaaggtctgacatacagcatctttaagaaacaaacaaatttacaagaaaaaaacattatgaagtgggcaaatgacattaacagacacttctcaaaagaagacatacatgcaaccaagaagcatatgaaaaaaggctcaatatcacttatcattagaggaatgcaaattgaaactacagtgagataccatctcacaccagtcagaaagactacgattaaaaagtcaaaaaataacaggtgctagcaaggtggcagagaaaaaagaatgcttatacgctgttggtgggagtgtaaattagttcaaccattatggaaaaagatgtggtgattcttcaaagacctgaagacagaactaccattcgacccagcaataccattactgggtatatacccaagccaatataaatcattctatcataaagacacatgtacgcatatgttcattgcagcactattcacaatagcaaagacatgaaatcaacctaaatgcccattaatggtagaaaggataaagaaaatgtggtatgtatacagtatggaatactatgcagccataaaaagagtgagataatgtcatttgcaggaacattgatggagctggaggccattatccttagcaagctaatgcaagaacagaaaatcaaataccacatgttttcacttataagtgagagctaaatgctgagaacacatggatatatagaggagaaaaacagacactggagtctacaagagggtggagagtggaaggagggagaggatcagatcaaataactaatcggtactaggcttaatatgtgggtgacaaaataatctgtgcaacgaactcccatgacatgagtttagctatataacaaatctgcacatgtatcccctaacgaaaattaaagttttttttttttttaaatgagagttggttcttgcaacctagtgtaagctggatacagcttaccagtcccttctctaatggcacttacattctagaagaagataatgaaaataaacatataaacaaaacactaaacaataagtaaagcaacaaaaaatgtaacacaaatgtttaataaaatgtctgatggcaatcagtatcataaagaaaagcaaggcagaattaagggtatattgagcatcagaaataattgggtttattttaggtaatgtgaataagaaagtcttctcacaggagtggctatctctcacataaattaaataaggaagcaatagattaaataaggaagcaaagtcattgggacgcaaataaatttttgaaggcagagacttgctaacaacttaggtttaaactggaaggttgtagaaaagagaaaaataaagaatgactcatagatttttggcttaagcaaattagtgaatgttgatgtcacttaccaacataataaagatggaggaagagcaattttggggagtagacatgggagaaactgaattttaaatcacaaacaatttatgtttatccattagacatatacctggaggtgttaagttggcagttgcagtcagaagagagaacagacctggaaatttaaatttggatattattagcatacacgtggtatttaaggtgatagaactgataaaaccatgtagagagtgaataaaagcaaagacaaaaagaaagtgctatgggactccaatatttagaggtctgaaaaaggaggagtatccccacataaattttgtaaagagtggccaaagaggtaggaggaaaacaagcaaagagtgttatcctggaatccaagggtagaaaagtacatctagaaaagggaatgtgcaactgtgtcaaaagctaatgagaagctaaatagaataaggattgaaaatttaccattgggttgcaagatggtggtgggtattgacctttgcaagaacagtttctgcggagtggtgggaatgaagggctaatgggtgtgggctgaggagagaacagaaagctgaggatgtggaaacagtaaatttattttttttttaaattttctatttcaataggtttttgggaaacaggtggtgtttggttacatgaataagttctttagtggtgattctgagattttgtggcacccatcacgagcagtgtacactgtactcaaagtgtagtcttttatccctcgccaccctccaccgtttccctcgagtctccaaagtcccaaagtccactatatatatatatatatatatattttttttttttttttttgagacggagtctcgctctgtcgttcaggctggagtgcagtggcgcgatctccgctcactgaaagctccgcccccacggggttcacaccattctcctgcctcagccccgcggaatagctgggactacaggcgcccgccaccacgccctgctaattttttgtatttttagtggagacggggtttcactgtgttcgccgggatggtctgtctcctaacctcgtgatctgcccgccttggcctcccaaagtgctaggattacaggcactttatcagtcttatgtctttgcgtcctcatagcttagctcccacaaatgagtgagagcatacaatgtttggtcttccattccttaattactttacttagaataattgtctccaattacatccaggttgctgaaaatgccattattttgttcttttttatggctgattagtattccatagtgtatatatatgtatactatatatatattacatatatatcacatatatgttatatatatagtatagtgtatctgtagtatagtgtacatataggatatatgtacactatataatactgtgtatatatagtataaatatatcatatatttatatatcacattttctttatccattcgttgattgatgggcatttgggctggttccatatttttgtagttgcaaattgtgctgctataaacatgtgtgtgcaagtgtctttcctgtatgacttcttttcctctgggtagatgcctaatacggggattgctggataaaactgaaggtctacttttagttatttacagaatctccgcccttttttccatagtgattgtactactttacattcccaccaacagtgtgaaagtgttcccttttcaccacatccgtgccaacatctattattttttgattttttgattatggccattcttgcaggagtggggtggtatcacattgtggttttgatttgcgttttcctgatcgttagtgatgttgagcatttttccatatgcttgttggccatttgtatatcttcttttgagaattgtctgtttgtgtccttagtccactttttgatgggattggtttttttcttgctgatttgtttgagtcctttgtagattctggatattagtcatttgtcggatacatagattgtgaagattttatcccactctgtgagttgtctgttaactctgctgattatttcttttgctctgtagaagctttttagtttaattaagtttcatctatttatctttgtttttgggaaacagtaaatttaaatagctcttcggggactgttgctccaaagagaaggttgggaggaagggactatttgtggtttaggggaaagtgttttttgtttgtttgttttttaagatgcttaaagtaaaatgattggggataggaatcatccaagaaaaggagaaactaatgttggagaagagagagatttttaaggatgaagttcttaagtaagcaagagaacacaggagccagtacagaagaggaagttccatcctaaaataagaaaggaacagttcatccattggagcaggagggaaggtagggtacagcggtatagatgtatgtgggctgatagatttcctggtggacagatgagattgttctcttataacttttgtcaatgaaataagataagagattaactgtgaaataagaggcaaaatctcgggatgccttaagtggtagaatagagggacctgagtttcaaccttggctctgtggttttctttcctcagtttttccactggcccttggctttgaaaggacattgtatcttcattaatttccaaacatagagcatccatttctgattcttttttaaaaaacatggtccgatagcctggcgttccagaaattctcaaaattgtttatcatagttctgtctctgctgtgactgagattcaagttcctgaaattgcaatatttttcaacagtcactgaatatacatagcaggggatatttctacaatgtgtttgacacctcatggaaaataaagacagggccccttgccctgtcatactccaagtccagtgggaggaggaaatgagaaaagatcataaataattattgcaacatatagcagaaaaggcagagtacaaaacagctggtcaaaacacagtggactcttctataagaatagctaaaattaaaaaggctaatgatatcaagaagaaaagcagatgtaaaccatatgtaaacaaataagtgtggttgtgtttcaataaagcttcatttataaaaataggctgcaggccagatatggctcgttagccagcttgccaacccctgctcctgagcaagattgtccattagaaatacaatgcgggccacaaacgtaattttaacttttctagtagccacatgaaaatagtaaaaagaagtggataaaattaattttattcatatttaatccaatatttccaaaatattattacttcaacattattatgatatttggccttgtcaacttttaacgtgcacttgaaagagaattggccctttagctatttcataaatgatactctttttatttcatgttttatgcgggggatttcaacgttagcagttaattctaattgagaaatctctatgggttttattcaatatattcctatgtccagattatgagaaactttagagacatcatcttctacccatattgtttcaaaatatcacagtttgtagcaataaaactctatcaaagggaacacaaagtcattaggcactttcagcccctatggtgaaataaccaataatgggcatttagatgtccctctccctcagcttggaatgtctctcttcctcagggtctcattggaatgtggctcatacacaggaggcttttatggtgcatgaaagtaaattcttaaacagcttcttctttcccttctttataaaaatacagtcttggcacccatctttctattgaattgctgtcagggaaggctttgctcaaggtcaacataacaagcctctctgccaggtactatggctgactttaatacattcagaggatttatgtcagattccagccactaaagattgagctgataatcgtaggtatttggcagaggcattagcatttctgtctgtgcagatttcaacgccctattaactattctgaagaatcatttacccagtggggaaaagtactgagttgagttagggattcctcgctacccaacacaggcaatatcataggaatttctattgctgtcggcatggggaaattaaccagggcggcagattgctttgactcctaatgaatatgaatgcacaaacacaaagatttcaaaaaacaacaggagcacagagacgaaaaaaaaatgagctttgatgtgagatctctctgtgaaggcccctatgagtaattttcttggaacagagtgaatgatttgctgctctttgagagaacataatctctgtgctatcatccaggacgcctcccaatagtacctgtagtatagacctcctttacaaaagttgttttctgtttaagtgcaaatgctacaaaaaatgataaataataattcagaagaagacatggagcaaaatgagaagaagagcagaggctctattttcaagaaaaagtatccaatttaactatttttaacggaaataaagtgctttcttaagtgccagaaatgaacattgatcttgatcatgcttggtttgttgactccatatgtgctttatgattggcacgtgataagactaatatttaattctagcaactgaattctgtgggagaaatagatgcagctactacagtagtaattttatgatcaataatataactctttaaaaatgtagttcactctttccttaataatgtcaaataatcacccattacatgaagaaagaactaacatactctggattggcaccttttggaaggttaatcagttcttgtgagtcatcaagctgaccccaacatattactgtgtgctcttcaatgacattttcaccccataagacactaagttcctggaagacaaacacaggaactatttactgtgtttttgtatcttccatacattccagcacattgctatgcacaaagctgatcctcccaaataagtcaaacacagaattattattattatggaagtttctaataggaattgtaggaaatgcagatctgattcttcatggttgagcacttattgaggcctgtttttctttacctactcacagtcttaactcaaaatttctatttatgatactgtctctgaccatgaactttgtctattcatgttgttattggggattctaaaagctgtaaggagctttgccagtatgcagccagaaattgctttctcccataaaatgtacccactctgaggatgctcccaagagtgtacccagttccctgctttgcaaaatgagaaaagacaactgggaaaatcagatatttgttacatacttctcacagaatgtagaaacttaagaacatttgctcttcttttaacttcaatccaagatagcgcaacacaggaagtgtgcttcttctaatattttggattcttttaagcactctgctttctacttcagcaaatgggtatggattccctattacaaataaggcaggatgcttgatactacagtgtatttagagatgtgcattgcaaagtccgacctcatagagttagccacacagtaggaggcataagacatgaatacatgttactcctatatgagacgatttgagaaagcatttttatgaacaaaggaaggctgactcagaagtgttatataataacaaaatacaaaatgtatattcaggatatatatattcaaaaagtatataacatataaccattctaatcatttatatgatgttctggaatgggcaaaattaatctatggtgaaaaaaatgagaatagtggcttctgggacatggtcacggctgagaacagatttgatggcactttctattttctatcttggtaggggtttggattacacagttacatgcatttgtcaaactcatcacatgatatactttgcatgtgtgtgtttcagtgcatgcaaatcttacctctataggaaactacagatggtccacaacgtacgatgtttcaacttaagattttttgactttatgatggtgcgaaagcaatatgcattcagtagaaactgtatttccagttcccacacaacaaatctgtttttcactttcagtattcaatacaaaacatgagatatctcaaaacctgagatatctcaaaacacgacatagccaatactgttataaaataggctttttgttaaacgattttacacaattgtagctaatgtaagtgttctgaactcattaaaggtagagtaggctaagttacaatgttcactaggttaggtatattaaatgcatttccaacttatgatgatatttttaacttacactgggtttattgggatgtagccccatcataatttgaagagcagctgtataaatattgaattctggttaatgatatgcgactacactatttaggaagaaatgtataaaattcacaatttactttgaaatacataaaaaagaagacagattgataaaatgataaaagatggatggatggtcagatacatgataaagcaaacatagtaaagtgttaatggtagaaactaggtgggatatatgagcattcactatacaattccttcaatttttctgtatgttagaaagttttaataataaattgtgggaaaaagcaacctcctatatgaggaggaattttgaaatgttctttgaaaatacaaggattttgagtggtagaaacagaaataatgggcattcactacttaggcattaacaaaatcagaggcctaagaaagtgagagggtgctctgggaagtagaaacatttctgcgtggtaaaacattaaagggaaagggtgggagagaaggcagctggggtcacaccatggagacttcaaggccaatcagcccggcaaactatgtgtctctggatacacagggcagccactgttgaggcttcctaagcataggatcagtaagagtagaattcccatttaagaaggggacttggatggtaggagaggactgaggggcagtgagaaccactaggatgtgagtaactggggtctgaattggagggcagcagaggagctagaaaggagcaacacctggagatacagcacgctcagggtgggggatggacagatcatgggcgttaacagggaaggaggcgtgaaacatgagtccaggcttcagccctgtgatactgggggattcccttatcatctgcttcacttcaaaagagcattaaaagcagctgatttacacagtagaacttgatgaacttgaaatggacaatttatgaaagattcgccaaggggcagtaacaatagaaaaagatgctcaatctcaatagtaaccaggggaatccaaactcaaataagaagaaaacattttcatccatcaacctggcaaaaaataacaagaataataatagccaggtctcaggaaggtgaaggaagaggcaaaggacagactaatatgcagttcacaggagtgtaaactggtaatgacatttatgagaaaatgtggtaatcttagcaaaacctctaactgtttctattctctgataaaaaagtttcattatggaggaatgtattctaaccaattactggcacatatgcctaaagatgaatggagaagcaagttcattttcagcattgtaatagaagaaaattggaaataactttattgtctatcaatagaagggatacattacagcttaccatctgtattagttttctattgctgccatacaaagtactacaaacttagagacttaaaacaacacaaagttattatcttacacttgtatagatcagaaaagtcctatatggtctcaaggccaaaatttagatggcagcaagttatgttcctttatggtggttttagaagacaatcgattttctgctcttttcatttgtgggcagaattcgattcctttaaattgtaggactgaggtccttatttttctgccagctgtatgctgaaggctcttcccagcttccagaggctgacacattccttggcttctagcctcttttccatctttacagccagcagtggggaggtggggtccttcttgtgtcacaactctctgacccatctatgtcccttcctcttccactaataaagactcctgtgcttaaattgggcccagccacataatccaggataaccttcccatctcaagccccaagatgatttatattcctttgtttactcaaaggaatataaatcattccttaatcacatcttcaaagtcctttttgccacataaggtaacattttcacagattcagggacattgttggggtccattatgccacctaccacaccatcattactgtggaaaactctgtagtcattgaaaacaaaaatataaacctaaattactgatgctgaaagatctctaacacatgtaaagtgaaaacaagaattcaattgttatgatattgccttatactaatattttgtactatattacactatattatgaccttatttaaaaatataaaaattattataaattaaaaacagtatatatatgtaaatatttaaaaatggaagtaatggaggaataccagtggacagagaatacatctgagaagaggtctggcttattaaaggacttatggggctttttgtagttaattccatatgcttatatatttttaattgactaggaaagtatgctggtatattaattatactctttcaaaagtgcaaaaccattgttactgcaaaaaggaaacataggtgaagtaaagctgctcttatgatagttggaataagaagcttaaagtcctgttgactagggcccctcatgccctgatgcccttctaagtatggtaaccatataatttgtcatttcactgggaccctgctgggagtaaagatggacactatcaataatcatgccagaacaataagcatagactgggactccttggtcacctacttctaaggaagtaattgctcatcttccccagcagaatgtcagctctaaaagagcagggccttgatctgggatgctcactgcctgaaaagagtgagtggaaaataggactgaactagtagacttacccagtttttagattgaaatgttgcctttgtcttactgatttttaagaagtttttcccaacttacaactataaaaacattcttttgtatttatcttttaattatttttatgtttttttttaacttttatttgaaattcaggggtacaagtataagtttgttacataagtaaattcgtgtcttgggggtttgttgtacagattatttcatcacccaggtattaagcctagcgcccattagttatttttgctgatcttctcgcttctctcaccgtccaccctcaagtaggtcccagtgtgtgttgttcccctctatgtgtccgtgtattctcatcatgtatctcccacttataagtgagaacatgtagtatttggttttctgttcctgcataaggatgatggcctccagctccacccatgttcctgcaaatggcattatctcattatttttatggctgtatattatcccatggtgtatatgtaccacattttctttatccagtctatcactgatgggtgtttaggttgattccatatctttgttattgtgaaaagtgctgtaatgaacatacatgtgcatgtgtctttataacagaatgatttctgttcctttgagtatacacccagtaatgggattgctgggtcgaatggtagttcagcatttaggtctttaaggaattgccacgttgctttccaaaatggttgagctaatttaccctcccaccagcagcatataagtgttcctttttctctgcaatcttgccagcacctgttatttttttactttttaattacagctattctaactggtgtgagatggtatctcattgtggttttgatttgaatttctctaatgatcagtgatgttgagcttttttttcctatacctgttggttgcatatatgccttcttttgaaaagtgtctgtttatgttctttacccactttttaatggagttgtttgttgggttatttttcttgtaaatttgtttaagttccttatagatgttggataccagacctttttggatatatagtttgcaaaaattttctcccattctgtaggttgtctgtttactctgttaatactttcttttgctgtacagaatctctttagtttaattagattccatttgtcaatttttgcttctgttgcaattgcttttggcaccttcatcatgacatctttgcctgtgcctatgtgctgaatggtattacctaggttgtcttccagggtttctatagttttgggttttacatttaagtctttaatttttatttatctatctattaagtcaatctgaagtttactatgtgtaatttgaaattagatgatttttttttactaaagggatagcccagttgtcttaatactatttatattgttcctactgttctgaaatactacctttgtcatataccaaatttctatatagttatgagtcttttccaaacttcaattccttcaatttgtttcattgttactgctcaagtaccttacctctttaataaccatagctttagaaggtattttgatatattttagggcaaatcttttttattgttcctatgtaattgtttttaggtttttattatacatttacgttttatatgtggggcttctgtgcaaattccatttgaataattaaaaaatgaattgatctatcttcttattttaccaatgagaaaattgagaattaaagagataaaattataaaaagacatacccataaggcaactagaactgtgaagaactgtgctgtctgataaggtagccgcatgtgactatttagatataaattaaagttaaataatttaaaaagtcaatgccttcaccttgttagctacatttcaagtgctcaatagccatatgtggctactgtctaccatttaacagcacagatctgagactttttcatcattgcaagtatttttattgagcagcactgagctagaaatttgggattgtgatttgggagagacctcggacttctcagacctgaggtcagtaacaaattcggggttcatccagatagatatggtagtaaaagttaattaaaacctaaggccatcaagggagaaagtaaagagagatgaaaagcaaatgacaacccattcctggagggctgcctgcattaaagaagcaagtaacaaaaagaagatttaaagtgagagatcagatacttgctacaagaattgaggtcatatcccagtagctcagagaaagtagtccaacaggagaaaaggtcagccacgtcacaagcctcagatgtttacatagaatgtgaccaatgtgtaacttttgagtttggcagctggatgaccagagaaagtctgcaagtggttgttgtgctcttttgcagacctgagacagtgatttgggtgaaagaggtatactatggatgcaattccaggaagtacagcaaaagagaagtatagagaaatagggaaagagagaacgcgaatacaggatgattaatgaggaggttaccactctgggaaactgatgctctgagatgccctgatcttctggagacaccctgaggaagtgcatagaacacacttcccaggtgttccaactaagggaagagaaggtttaagcaattgcccactactttttattaatagttctcttttaatgagggttgtttcttggggtgtcaactccccaacaactgtggcctgcctctttgtatgaagcaagcctgcatagccacagaaagccttcaggcagatcaactcaggagcttcaagtagcaagaaagtgtgcaggaactatcccccaaggctgtgatgacatacaaagttgactgagaggattatgggggacactgacagcatctactactgctaggtttaggtgcatggcaatagaaactgagtttccctccttgttgcaaaaggagagttgcaacaagagaaataatctaattttatcagccatggccaccagctgtttagacagaaaaacatcgagatgcctcagagtctatcccaggcatgtgatggatacatcctcattctaccagattccactggtacatctgctggcagctgccacatcttctttggcaccaaaggtctgtacctctcttcaatgttgaagaaatttcagtttttgtttaagttacccattcccctcatggaacctattttaatgaagcctgagcagaagacaaattgaaagtcacacactatgtatcaccacatgtatagatagtgtcactccatgaccctatgtcaaggtcactgagtcaggatcacctaccagattctcttctctgtagaaagagaagttatctgagcctgcttacagctagacttctagaaaacctgtcttgtcagtttaccatacccctctgagttccagcaacaaagcattttccccttcactttcaatctaaagatatgattatcaatcattctcactaggtttctcattctgctaaagaaagaactttttaacttcaacggccaaacctgctaataggaagaagaaagagacaccatgtgcaccgttgcctttgcacaccaccaacgctgtgccatagtaccagaagaggacctcagtcttaacccaaacacaagggcctggcacagcttgggacattgagttggccatgcctttggctctgatagcccaaaggacatttaaccagtcccccaatttcacttctttggtgacttgattaaaaaattatcccaaagttcccatctctccctatattcacatccttgccaatgtggcctttctgcttggtcatcaagagttaatgtttgttctcttccatttaaatctagtttggcctcgtaatttgagttttcaacagaacacagtagacatgagggcctccagagaccttgtacacatttactctctgtgatcaagcccaggagaacctgctagctaaaggatcaccccagccttcagccagccacgggtgtgaggccatcctagatcagcccaccaccactgactcaccagatggccattatacacatgaatgaatccagaacccagctctgaattaaatcagaagaattcccctatggactcaaaagtgtaaaacacagttcacattttaagctatggagtttggagtgttttattaggcaacaaaagataactgataacaacatatctgggcctcaaacttgtcatctgcagagaagaagactaaataaaataacacttaaggtttttattgttttgtatatttttcctcctagcttcatttttctatggtttttagctgaaatgaaacacttcaaagtggatatattaatttgctggacactagaaagctgatgggcattagttgcaccataaacactcaggtacttggcaacacaggcagcagcacacagatgggcttgaagtagggtagcagagagcacgctcagtagtgcaggattcagagtacctggttacctgcataccagaatcagccatcactctggccaccccaaccctctcctcccggcaggtcctcccagatcttatgcgtgaagtgcgttttgattgcttatattgattttatacccaaacctctcctttttagatattggcaagactattttcagccttaacaattgcctaggatttatatggccaaatggattaagcctgtagagaaatcttttggctttctttaaaaacaaagtgaaaatgtcctactgtttgcttaatggaacaaaatggcttccactcaaaagatctctcagggaccaaatgattcatgtaatagcatgggagttctattgacccagctgaacacatctatacatgctaagcctgcctcctttcttttactgagaggagccatttaaaggcaccaaagtattaggttctaattttggttacttaccaactgtgtgagtcagaacaaattacttagcctctctgaatactggatagggataaataaaatgggaatcatatgaacagtattacagggttattgtgacaattaaatgaggtgcacacgcaaacagcttgagacattctcatttgctcagttagtattcattttccttacgttgtgcactgattcatttcctatgcatcattcaaagcctgacttagacgatgtccctctgtaaagtctttattcacaaagtcagctcatgttaaactctttttttttccactcttatttattcagaaaaatgttctaagtatgacttaggcccagggataaagccattagcaaaactgttcctgccacatggagagaggtacaataaactaaatagcataagattaattcaactcatcatgatgcaggcaacccagcattattttcgaacattatgggagtatagaacaggggcaaatcagggaaggtttcccaaagagtgccattgaaacttggacagaagtggaagcaggtgttaaccctgagctgggaaaaagagcttatgttagccaatctgaactcctgacttaatttttttcccttgtatactaattggtgctccaactctacattaacctaagaaattttctaatagattaatttggtttatcccaccaattagattttacactcacctggagcaaggcccatatattctactttttagtttttttatttctctctaaagcttaacacagtgccaggcaaaggttggtgctcagtaaattgttgattggttgagaacaaaaaacacttaagtgatttataccgactgctcttgctttgcaaaacatctcacagtggcctatggattcatgatcactttttaattatttttttctaaatataacaaatgtacaggaaagagtacaaatcataagcatgcaactctatgaattttcatgaagtgaatatagccatgtaattattaggttggggcaaaagtaattgtggttttgtaattaaaagtaatggcaaaaaccacaccaacctaatagcacccattttcagaaaagcaacattgctgttccccaaaatgtcccctagtgtgcctttgcaactaccacctccccaaaggtaaccactaccctgacacctagcaacatatttttgcttgtattttgaagtgtatatacagtgcgaactctgtgtcttgcttccctactcaacattatgtctttgggacccatccatgttgttacatgtagctgtggtttgtttacttctgttgccatatagcatttcattgtgagaataaacactatccattggctctttttggtccttgagcatgttgctctgaacattctggtatgcatctttttgtaaatatatgcgtttattgctgttggatatattcccgggtggaaattttctggagcgtatggtcatatatatttatcctgactttagtagatactgtcaaaaattttccaaactaattgtactaaattttgctttcgccagcaacatgcctactcatttttaaaataatggccattttgaaagtcaaaagtttcttggatctacctgctttatagagcctagaggttatgctgttggcaccaagtgatgggaaggataccagctcacatacagatgtgtggacttctcacaaccaaatgctcagtttcctcagccacacccacattggtggggaaatgcagtaaagttttatagtagtgtgtgttttccaagataaaatgggttttaaaaggagtcactgttttttggtgtgatttgtaaagacaggctgtttctctatcatctctcctccatactctgttaacaggaaaaatatttgtttctagaaagtggaaagataacaaaataactacaatcttggaaattaaaggcaaatacatctgtaatgtttcctgcaactgtggaattttctttgttctgtctcttcttccgcattttcttctatgccagaaactttgatgtaacttctctaagctggggccagggcaatctgtgttgcagcatggcctccttttcccttaccaggctgagaataaacaagtctctgcctcaggatgatgttcactgccattaccagaaatatcttgttgctggtgcccatgtcagttgagttaacacaccctttgataaggtttggctgtgtccccacccaaaatctcatcttgaattgtaatccccataatctccacatgtcaagggtgggaccaggtggaggtaattggatcatggaggtggtttcctcatgctgttctcctgatagtgagtctcaggagatccaatggttttataagcatctggcattttccctgcttgcactcactccatcctactgccctgtgaagaaggtgcctgtttctcctttgccttctgccatgattgtaagtttcctaaggtctccccagcaacgtggaactgtgagtcgattaaacctctttcctttataaattacccagtcttgggtatttcttcatagcagtgtgagaactgactaatatgcccttattaaggaaaatgctgaagttctgttgagaacagaacagattgtgagtgctggctctgtggcccttggattttataagcatctacttaacattcatatgctttcatggttccttgaacacagtaggatctcaggaaggagtcaatgcatccaagtcttgcccttcagacctcaggtttataacataacagtttaacaaagatgccccacattttccccacattcagccctctaagggcaatgcttccataatattcctggcatgtagcagagtggccagcacagagactcttttgatacatgtcaaatctttaataattgatgtaattagtgccaatgaagaggagagaaaacataaaatggtttagataactgacagccaaacagaaactcaatcgatgagttgcttaaatgttctttctttatctaagatgttagctaacattcagccatggttctcacagacacagggcatatctccatgtacatgttttgaagtaggacagcaacacagcaagaactgtatctattataaaagctgcttcttacaatagtattgtgccaggcatgcttttttgagtagcatatataccaattagacaggcttatagaagtctttgaaggaatggattttcctttccccaattaacttcctcccagtatccaatagaaccagcttactgatattccaaaatgatcctaaatgaaattgcaagggtcccttgacatattttaggatgataatataatcatatatgatttaatcaagttcatttcaagtttattgctaagggatatgaggactggccgtgctccccacatacattctaaagatgtcttggttttggtttgaggaaaaggaaagcaaaatgcaaagactgcctgagatgtcatctctgggaaagtaaaaataaaaacgtgccttaatttggattcctctctttcaacatcctatttgggatcatcatttttcaccaccaagaggttctgtaagtgaaaagcaacagtacttgtttaaatgaggcccagaagcattttccctttgaatgattctaggttgtgttgctaaaactgttaaatctgcagagcttcagaataaggacagttgtaagaacactgctctgcaagagaacatggggacttgtatccccatgcttccttattaatttgctatgagtcatcgaccacctatcgcctcttttcctaaccttgttttgcaacatgatttgtccacacttatttattaagaacattacattatttacagcttgttcattgacagcatgtctctgaaagtgacagaaaaacgatataatttgttgtccttcctaagtacttaaggggaaaaaagaagatattacgcaaagctttttgaaattcacaaatgaggcgggataaaatctctgcagaatttataaagtctgcacgatgcctttgatcttgatgtattacattccccacccccgctctcccttctacagtgatgccttcaatattttaccgagctgggctaacacacagctcacaattttaaactgacaaatctaagtgcataaattttagatgctttttgcaaaacagcaagactgaggacaaactgtacattcagagtattatagcctgtcctaattcaagccatttccaaacacacatttttaccctttgcagggtttgggggcatatttcaaacaaatatcagtgctttgtgtttatgccatgtaataaagaatatctggggcccgtctgtaggagaatatctgttttccaaattgtcttggttatggggagaaaatggattctactgtgaacacaaatataagagtaacctcacaaggaaacatttaaaatctgctcattggggacttgctaggacctttaatattgtgaaccccaaatacctgagacaaatctcagttaatttagaaagtttatttgccaaggtggagcacacgcacccgtgacacagcctcaggtagtctggacggcatgtccccaaggtggtcagggcacagcttggttttatgcattttagggagacatgagacatcaatccatgcatataagatgtacattggctccgtccagaaaaatgagacaagtcaaagcagggaggggacttccaggtcacaggtaggtgagagaaaaacagttgcattcttttgagtttctgattggcctttccaaacgaggcaatcagacatgcatttatctcagtcagcagagggatgactttgaatagaatggaaagcaggtttgccctaagcagttcccaacttgagatttcccttaagcttagtgaatttagggcccaaagatttattttcctttcacaatctatttattactaaagtgagcttcacccacaggtgggtgccatgtgatgggagacacaaggaaaggatggctgtatgcaaacacgtccctttgtcctcatcaccttcttgcttccccaagtcctacgggagtacatggcaattaatgactagaaaaggcgattagggaagaatatctctggagttaattcagtacaatagtttctgtccctgagagtcatgactactgttcatggggaggcttaaattagttgaaaactagctttcttggaaagaatacaagaaggatctggtcagtgggatgacagacgcagcagttagacacctctgagcaatgggagtatagagagtgggaaagcagagatgacaacattgtgcgatgttgccccacttatcccgtccttccccggaagccgttttgaccaatcatggccttgctgtcctgtaagtcggatgtgcccctggactcctcatcaacactcccaactgaccagtgggagctggcaagtggatgaaattatgcaccatctcctgtctactaaaggagtcatcaaaaagggcaggaggaataacaagagtgggcttgaaggtaaaagggacagaaaaacaagatgagaacttggcttcaaagctacactattaagaacagtgaccacaatagtactaaaagctaccgtttattaagtctctatggtgttcctggcattctgctggatgctttccttggtgcagtagagagcacggttattaaatctgtagtcagactgtcaatagtttgaatcttagcagaaaagggtactatcttaatttgttttctttgcttctaacagaatacctgaaactgagtaatttataaagcaaaggaatttatttcttacagttagggaggctgagaaggccaaggtcaagaagccacatctggtgagaaacttcttgctggtagagactctctcgagagttctgaggcaactcagggcatcacatgaacaaaggcctctcttcttctaataaagcccccagtcccattctcatagcccattaatctcttaacctattcattcattcatgcatggatggattaattccctcatgagggctctgcccattcaaccccctcttaaaaactccacctctcaatactgccacactgggaattaagtttcaacctcagttttgaagaggacaaacactgaaaccatagctggtacctagagatttaaagccttagtctcttatctgtaaaatggtgatactaatggtatatagcctcattggttggtttcaaggattaatgagataatgtattgaatgtctttggcatattgcctggctatcaatcactgttagcttacttctaaaatatgatcagtgctctataaaagattgctatgcagcaacattatttcttaaaccataaatcagagtgttttgtgaatttttttcctttccctcttctctcatgcgtacttccagagagcagagtttcctttcctacccaaaccaaacaggggcaagcatttaaagatttaagtgcctagtgaatatatcctatttgccagcttttcccctcctagaaacaaaaaagcctgggacttctagaaaggcagggaagcatctgagggtccacttgaactccagtgaaaatggctccaggattagatgcactcaaagtgtgaaatagaaagcaaatcttcccgaacggggcctaggcccaggagtagaagagataatgaggaaggacttcccatgattcacataagtgcccctgaagaaaaggtgggaaacttggaatctttttgtgggagacggtagagtgaagagagagttttgcttgcctccttttcctctgtttgtgtgtatgtgtgtgtgtgtgtgtgtatgtgttccaatataatggaagaagcagaatctgccattgtaagtgagatagtgttgatctcgcagacatggatatagctattataagccataacctgtaagaatgctttccaatagaaatataagccacatatataatttaaaatccttaatagcaatatttaaaacagtaaaaagaaacaggtgaaattaaatgtaataacatattctaatgtaacccaatatattccaaatgttatcattgtaatatgtaaggaagatgaagtcaattgtatcaagtctttggcatctaatatgtatgttaaagctaaagcacatctcaatttgaacaagccatatttcaagtgttcaatggccatatgtggctattggctactgcatcagacagtgcaggtttatattcttcagagctccgcagaaaggctgacagcatcatttctattttacaaataagaaaaatacaaaacagagaagtacataactggtcaagaattcatatattaaaccaattctatctcactccagcctctgtatgattttgccaacctacactgattcttggggcttcttcatgagaaaacagaaataatacatacctctctcaaaaagacaaaatgagaccaacaaaattaagaaagcaaaattccaccaaatattctaccacaatctccacatcagtttcaatttttgccaagaatcttctttgctcgtttaaaaacaatctattaagcatcagtattatggcagatgcttattttggggacaagacagcaggagtctgtttcttcaagccaagcaggagatgtcctaggccacagagtggaacatttagtagagtgagactctagtgaagaagaacttggaagtggcccattattatcctaatgggaagtaaattttctttagcaggaattatttcagttgcatagaactttcaagttacttcctaaatggctagagatttgggggtggagataaaaggctggatatgtccttgcaatgtcacctgatccccagcccaatacttaacacagctcctttgctcacccttcttctacttcaaaccagttgatgggagcccaaaactgtgatttagaatctcactcaacttttgtaaaagtacatatgtaattgtattagtctcttctcacattgctataatgaaattcctgagactgggtcatttataaagaaaagaggtttaactggctcatgactctgcaggctatacaggaagcataccagcatctgctcaccttctggggaagcctcagaaagctcacaatcatgacagaacgtgaaggagaagcaggcatgtcttacagggctggagcaggaggaagagggagattgaggtgccacacgctgttaaacaaccacttctcacaataattcactcactatacagtaccaaaggggtatggttctaaacaattcataaaagattcacccccatgatccaatcacatcccaccaggccccacttccaacatcagcaattacaattgaaaatgagatttgagtggggaaacagatccaaaccatatcagtaaaataatacaggctcaagagaaaatttaagaaattaagataataaagtttcattttactgagaaaggtttcatttagagagaataggtgaatacccaaagatcacgcctgtaagcattgagagaaagattcaaaatctcttggttttcaaaaaaaaaaattattaacataaggaatgggagaagttatttgcaatacatatgtttgatatggaactcccatccagattatataacaatgccaacaaatcaataaaaaaagacaggaaacccaataaaaagaaaaaatggacaaaagacttgaacagacacatcgtgaaagagaatatacaaatagccagtaaacattttggtgggctatgctcaccaaacccatgtaaaaaatttttatcaagatttcatgataatggctaaaacctggaaataactcaaatgtccatcaataacagaatagattaaaggtaattgcagtgtgtttagagaacgaaatgaaaagcaatgagaatgaacgaattgccatcatttgcaacagagatgaatctcataaacatgatattgagcaaaagaagccagaaataagaaacttgtataagtcttcctatataaagttctaaaataggcaaaactaacctatagtgttagaagtcaggtttgtgattagccaatcgaatgggtaggaagtgactagaagtgggcatgtaaagagggagtgtctagagggctgaaaatgtttcttgatctcactgaatgttacatgggtgagctttatttctcaaaaatgtaccaccatgtacactcatgatacatacacttttctctatgtctggcattatgtcaacgagggaaaagagagacctcaagccagtgaatcagagatagggtttactgaggacttacatacaagggcggtccagtggtggtgggatggaaaggagaaccactaccatttgtaaaaagcacgcagtttatatagcatttttgcttagcaccctccacctaccaacctccatttaacccaacacaaagggacttggtcccttgtacagcctgcattccaaggaatgggctgggggttcagatgttcttcgtagataaggagtgaatctctgtattggccattcctggattcttcagctgggaacaccaaacacacattcttcttaaaccacagggtcattctcaagctatgcttaagttattgctgtcaaatgtgtctgccatacactgttatatttcaatgaaagactttacaaaaaggaaagaaaatgccagaattcttcccaagctaggtgcttgtcttggttagtagatttggaaatttgagccctgccctacttcctacccttcacccacaaagcatttctgacccttccacttaaggattccaaacaatctaatgcctctgttggtcatgaccatcactcaagaaaatgtcttttggtgattagaagttcaatttaataaaatcccttgctgaatattttagagcaggaattacattaagattatccaagcccaaaagttcaggtgaattatcagagtgatggtcatattcacaatgtttcttccttcctctctcataacccagagtctccctgaggttcccaagcaaaagcttacaccagacattttgtacaaataaagaaaaaaggggagctttttcaccccatttcctgtgtcctatctatagaccaatgccaaaatggcattgagaaaagacattgactttagcgttagagttctatagtcataccaaattccccacaatcttgtaaacacaaactgtcctgttaacaatattttggagaatgtccatgccaggggaagtctctacagtggcaaaacagtcatccaggacatagttatggaggcttccagctgtgacaggtccttgataaatttatcaaggaaggtctaggtcatggtcctcaaccttgcaagtataaaatctacagtagtggtataatactgtagggaatgacctgactcccacagccctccttctcctttttcccatggtcttttctcccatctttggcagttagattacttcttcttcagtgttatcactgaaaagtacagaaagagagagacaacaatttaatgtgcagccctcacattcaacatagagcttggaggagatggcagaatgacaccagtgagtggcctttacctgtacatcaacctagagctgctggaagatgtctaccaggtatctgccatgctcctgggggtccccaacatgtgacaagctagtccatctccagctgtggataaaagggcagaggctcccccttggccctctgactcaaaaacggaatatgtcattgcggcctttaaaggccattaagatgggtggctggaaaacctacccaagctgctttcatcaacaaggtggaaatgtgagacctgttcttcaacgctgtgctggtcaagtgtgcatggtgagtgcctgcataattacttgttcccttacagcagagcctatgatccagcagcatggaaatgctttctgtcctctcagcagtccaattatcaagataatcatgcataaggagcaaatggcctggaccagttgtcactgatggtggtgatgcacccaccatactgagccgcaaccctgcagaacctggccctgcagctggcagaaaggagaaaatgagttagtgattgctcacaagcaggtcacttctatgggagtgctttgtctaagaccggaggactggctctgcaaaaacacaggctacgcacatagaggtggtggctgacagcagcaacttcagacaccctgttgatcactccacctatattgccatgactcagactgctcaacttgtaagggataaaccgtgatgctcttcatcttcctatagtccaggcactgaagttctatgtaaagcttaaaaaacttaaaaaaaaaaaaaaaaaaagcttttctcccatggagtcattacagatggactagagctatgagatgtagacagcaaagtgacatggcttcagctgctcatacactactgcttataacaacacaggtgccctaagaacctgtcttttaagtattctttttttttttttttttttttttgagatggagtttcgctctgttgccctggctgttgtgatctcaactcaccgcaacctctgcctcctgggctcaagagattctcctgcctcagcctccagagtagctgggattacagccatgcaccaccacatctggctaattttgtatttttattagagacgtggtttcaccatgttgatcaggctggtctcgaactccagacctcaggtgatccgcccagcctcggcctcccaaactgctgggattacaggcatgacccaccatgcccagctgaagtattcttttttaacagctttattgagttataattgacatatggatactgaatatatttaaaatatgcaatttgatgatttggcatatgcagactactgtgaaactattaccacaatcataaaaataaacttaactcttcacccccaaaatcttcctcatgaccttttaaaatctctccctttctgcctcattcctaaacaaacactgatctgctttctgttctattgatttgcttttagtgtctagaattttagacaaatgttgctttatttagccatagttgatttcttttcattatagatatgctcacccccaccccctaccacatacacaaacctttgaagcccatggcagagacaactttgagagaaagactctgagacttgtgagactaaatccttggagaatctagatgagaaaatctcatctcaagctgctcctcatttcagagattgacatgggagaagacatcaaaatggacaaaagcttccttcccttctttcaccagccttgggaagaattccacagccagtggagagtaaaattttccaggaaaatcaagagaactagactgctggctgctaacgtgggagaagatgggaaaagccttagggaagtttaaggagcccagaatgcaggggaccaatactcaaagtccagttagaaacacagttgtctcagtgatactaacctaaggcatcaatgacaacaaagtgcacccatgttaacggagggagagaggccgcataaaataccgaccgtgagaagaagcaggagaaatcctggaactgaatgagaaatcccagaaattccttagaaaaagtggcatgattatatgtgcctggaactaactggaattaatggctctctaactagaaatttaatttcgttatccaaaaaaataagttacattttacacacctgagcacttagcttgtgaaagtcacacctattacatgatcctatgagtgtgtctaagtgattatgtccatttctaacaataagcttcatgagatactgataaagaacatttttaaaaaaatagaaacaatttaaaaatctgtgctgagctgcctccctcctgtatcctctttgctctgctacaggccctacctgatctgcccacctgttccttgtgctcacccttcctcaagctgctccagccaccacctctgctgcctcacttttcccagactagtggttccctctgcttggaatcccttcccagaatctccccaccaggtactacttcacttcctacaggcatttaatcaaaaggcttctcaaacaaaaaaaaaaaaactttttaaaaatttcaacctccagggcttttctgccccccaccccacaaactatatactgtatatggcttattgcctgactctatggctaggataagtgccctgccaggctatggattagtttttgttttagtcacattttatcttcagcaggtcaaacagggcaagatattgattggaccctcagtaatcactccacgaaaggatataatccactggccactgccttcccttcctctaggtagcattcacaggtagatgaattacaataggtagaaggcgttttctccttgagtctacaatcggattcaaaggtggattggcaaccaggctctgacagccacagcatctgcccccaccatagcatttggcctgccttctctgatcacaccatcagaggcagcctgcctctgagacggtcctaagcaggtaccacccacaccactctctgtatttcatccccagcccctacctaccagagggagcaattttcaaagaggaagacacattatgcttacaacagtcaagatcctgtgcctggtgtattttgtttaattgagctctccttttccaatgcttcaaagataaaccagctcccctccagtggataaagtctccctttgggtttatcatgtgtttaatcaagcttcagtcaatcttggggctctggacacaattacaatgcctgcacatctctattccaggccattatagttagagcttgattttgcaatggccttattaattttaagccttttgggtaacatcagtgtagctctagagagcatgttctctaactaccagggcaactacttacaaatatagagaagcatgtatcagtgaaaataataataataacaataataataatagaatttactcaactcacatcatgtgccagaaagtgctccagccctttacatgtagtaagttatttaatataataatcctatgaggtaggtgctgttatctattccattttatagacaaggaaactgaggcatagagaaattaagtaacttaataacattgcatagtagtgagtggcagacctattgttgcacagtatataatcacagtaataaattagataaaaatcaaagacaggccgggcgcggtggctcacgcctgtaattccaacactttgggaggccaaggcgggcggatcacgaggtcaggagatcgagaccatcctggctaacgcggtgaaaccccgtctctactaaaaatacaaaaaattagccgggtgtaatggtgggcgcctgtagtcccagctacctgggaggctgaggcaggcgaatggcatgaaccttggaggcggaggttgcagtgagcggagatcgtgccactgcactcctccagcctgggggacaaagcaagactccatctcaaaaaaaaaaaaaaaaaaaaacaaagacaatattaaaattatttaacaaccagaacatgaaccctcatcatgatccagtcacctctgaaaggcctcacatctcagaactgccacattgggtattaagttttaacatgaattttggaggggaccttcaattcagagcaatgcacataaaacttcataatagtctaacaacatccccagacattaaaggaggtagacaaaaaaaattcaagttcatctgaaaacacttgattttatttattaatcaagcagatattttcatgtgttactttcataaagtttcataaaaatatttcataaattaaaaatttaataaaaattacttaaagctgtatagttagctagagaaaaaaatgattaaaaaataaataacctctgtttttaacactaaattctttttatggatccatatattcctcctctaatctaatattctgtgctgctattgtagtggctatgttgtctgtctggggtatatacccctggggttcctcgtcgcctgccaggaaaatttaggacacggacacgcacgaggagtttaagagcggaggttcaataggtggaagagaagagaaagagaaacagctacctctatagagtaaggggtctctgaggggaaagtactggctggccgtgaatgcaccaagttttatagtccagtttgaggaggcggtgtctgatttacatagggctcatagattggttcgatcacgtatgacgtttacatagtgcctggggaaggcttgttgccccaccctaatcttcttatgcaaatgagctttccagttgatcgaggccatcttgtctatttcttactgtacacttggctggcagagaagggaagatggaactgccatcttgaacatgtctagtccttagttcctgccagcattcactgtgcaagctaccagcttgcttgtgtgtatctgcagctcgacattacaggctgctctttgttagaaaatgatttggggctgcttttcactaaagagagaagacttactgaggactcccatgcccttactatctgcctaagtaatttcttcttaacttctatatcactatcatctggataattatttaacttcagttcacattattaacatggtagactgttttactcggttactgaattattttaaaatatttgtaatgagcatctgctatgtaccaggcacagtgctagactatgtatttaaggagtgaacacagcagacaccacctctgctcacagcaccaagaatgcaagtgagaattttagcagtggaaaagaaaatatgtgtatttcttcacatgcagcccttataagccaggctaattgtaaagggtaggaatgtggggacaaagggcagggatgcttctggcaggttgaggattctgaccttattctaacagcaatgggaagctgctgatgagtttccaaccatcgagccgtccagtcagatttgtgtttaaaaaacaagacaaaataaaaccactagggtcactggatttattttatttatttatttttttattatactctaagttttagggtacatgtgcacattgtgcaggttagttacatatgtatacatgtgccatgctggtgcgctgcacccactaatgtgtcatctagcattaggtatatctcccaatgctatccctcccccctcccccgaccccaccacagtccccagagtgtgatattccccttcctgtgtccatgtgatctcattgttcaattcccacctatgagtgagaatatgcggtgtttggttttttcttcttgcgatagtttactgagaatgatggtttccaatttcatccatgtccctacaaaggatatgaactcatcattttttatggctgcatagtattccatggtgtatatgtgccacattttcttaatccagtctatcattgttggacatttgggttggttccaagtctttgctattgtgaatagtgccgcaataaacatacgtgtgcatgtgtctttatagcagcatgatttatagtcctttgggtatatacccagtaatgggatgtctgggtcaaatggtatttctagttctagatccctgaggaatcgccacactgacttccacaatggttgaactagtttacagtcccaccaacagtgtaaaagtgttcctatttctccacatcctctccagcacctgttgtttcctgactttttaatgattgccattctaactggtgtgagatgatatctcatagtggttttgatttgcatttctctgatggccagtgatgatgagcatttcttcatgtgttttttggctgcataaatgtcttcttttgagaagtgtctgttcatgtccttcacccactttttgatggggttgtttgtttttttcttgtaaatttgtttgagttcattgtagattctggatattagccctttgtcagatgagtaggttgcgaaaattttctcccatgttgtacgttgcctgttcactctgatggtagtttcttttgctgtgcagaagctctttagtttaattagatcccatttgtcaattttggcttttgttgccattgtttttggtgttttggacatgaagtccttgcccacgcctatgtcctgaatggtaatgcctaggttttcttctagggtttttatggttttaggtctaacgtttaaatctttaatccatcttgaattgatttttgtataaggtgtaaggaagggatccagtttcagctttctacatatggctagccagttttcccagcaccatttattaaatagggaatcctttccccattgcttgtttttctcaggtttgtcaaagatcagatagttgtagatatgcggcgttatttctgagggctctgttctgttccattgatctatatctctgttttggtaccagtaccatgctgttttggttactgtagccttgtagtatagtttgaagtcaggtagtgtgatgcctccagctttgttcttttggcttaggattgacttggcgatgcgggctcttttttggttccatatgaactttaaagtagttttttccaattctgtgaagaaagtcattggtagcttgatggggatggcattgaatctgtaaattaccttgggcagtatggccattttcacgatattgattcttcctacccatgagcatggaatgttcttccatttgtttgtctcctcttttatttccttgagcagtggtttgtagttctccttgaagaggtccttcacatcccttgtaagttggattcctaggtattttattctctttgaagcaattatgaatgggagttcacccatgatttggctctctgtttgtctgttgttggtgtataagaatgcttgtgacttttgtacattgattttgtatcctgagactttgctgaagttgcttatcagcttaaggagattttgggctgagacgatggggttttctagataaacaatcatgtcgtctgcaaacagggacaatttgacttcctcttttcctaattgaataccctttatttccttctcctgcctgattgccctggccagaacttccaacactatgttgaataggagcggtgagagagggcatccctgtcttgtgccagttttcaaagggaatgcttccagtttttgcccattcagtatgatattggctgtgggtttgtcatagatagctcttattattttgaaatacgtcccatcaatacctaatttattgagagtttttagcatgaagggttgttgaattttgtcaaaggctttttctgcatctattgagataatcatgtggcttttgtctttggctctgtttatatgctggattacatttatcgatttgcgtatattgaaccagccttgcatcccagggatgaagcccacttgatcatggtggataagctttttgatgtgctgctggattcggtttgccagtattttattgaggatttttgcatcaatgttcatcaaggatattggtctaaaattctcttttttggttgtgtctctgcccggctttggtatcagaatgatgctggcctcataaaatgagttagggaggattccctctttttctattgattggaatagtttcagaaggaatggtaccagttcctccttgtacctctggtagaattcggctgtgaatccatctggtcctggactctttttggttagtaaactattgattattgccacaatttcagagcctgttattggtctattcagagattcaacttcttcctggtttagtcttgggagagtgtatgtgtcgaggaatgtatccatttcttctagattttctagtttatttgcatagaggtgtttgtagtattctctgatggtagtttgtatttctgtgggatcggtggtgatatcccctttatcattttttattgtgtctatttgattcttctctctttttttctttattagtcttgctagtggtctatcaattttgttgatcctttcaaaaaaccagctcctggattcattgattttttgaagggttttttgtgtctctatttccttcagttctgctctgattttagttatttcttgccttctgctagcttttgaatgtgtttgctcttgcttttctagttcttttaattgtgatgttagggtgtcaattttggatctttcctgctttctcttgtagacgtttagtgctataaatttccctctacacactgctttgaatgcgtcccagagattctggtatgtggtgtctttgttctcgttggtttcaaagaacatctttatttctgccttcatttcgttatgtacccagtagtcattcaggagcaggttgttcagtttccatgtagttgagcggctttgagtgagattcttaatcctgagttctagtttgattgcactgtggtctgagagatagtttgttataatttctgttcttttacatttgctgaggagagctttacttccaactatgtggtcaattttggaataggtgtggtgtggtgctgaaaaaaatgtatattctgttgatttggggtgaagagttctgtagatgtctattaggtctgcttggtgcagagctgagttcaattcctgggtatccttgttgactttctgtctcgttgatctgtctaatgttgacagtggggtgttaaagtctcccattattaatgtgtgggagtctaagtctctttgtaggtcactgaggacttgctttatgaatctgggtgctcctgtattgggtgcataaatatttaggatagttagctcctcttgttgaattgatccctttaccattatgtaatggccttctttgtctcttttgatctttgttggtttaaagtctgttttatcagagactaggattgcaacccctgcctttttttgttttccattggcttggtagatcttcctccatccttttattttgagcctatgtgtgtctctggacgtgagatgggtttcctgaacacagcacactgatgggtcttgactctttatccaacttgccagtctgtgtcttttaattgcagaatttagtccatttatatttaaagttaacattgttatgtgtgaatttgatcctgtcattatgatgttagctggtgattttgctcattagttgatgcagtttcttcctagtctcgatggtctttacattttggcatgattttgcagcggctggtaccggttgttcctttccatgtttagcgcttccttcaggagctcttttagggcaggcctggtggtgacaaaatctctcagcatttgcttgtctgtaaagtattttatttctccttcacttatgaagcttagtttggctggatatgaaattctgggttgaaaattcttttctttaagaatgttgaatattggcccccactctcttctggcttgtagggtttctgccgagagatccgctgttagtctgatgggctttcctttgagggtaacccgacctttctctctggctgcccttaacattttttccttcatttcaactttggtgaatctgacaattatgtgtcttggagttgctcttctcgaggagtatctttgtggcgttctctgtatttcctgaatctgaacgttggcctgccttgctagattggggaagttctcctggataatatcctgcagagtgttttccaacttggttccattctccacatcactttcaggtacaccaatcagacgtagatttggtcttttcacatagtcccatatttcttggaggctttgctcatttctttttattcttttttctctaaacttcccttctcgcttcatttcattcatttcatcttccattgctgataccctttcttccagttgatcgcatcggctcctgaggcttctgcattcttcacgtagttctcgagccttggttttcagctccatcagctcctttaagcacttctctgtattggttattctagttatacattcttctaaatttttttcaaagttttcaacttctttgcctttggtttgaatgtcctcccgtagctcagagtaatttgatcgtctgaagccttcttctctcagctcgtcaaaatcattctccatccagctttgttctgttgctggtgaggaactgcgttcctttggaggaggagaggcgctctgcgttttagagtttccagtttttctgttctgtttttttcccatctttgtggttttatctacttttggtctttgatgatggtgatgtacagatgggttttcggtgtagatgtcctttctggttgttagttttccttctaacagacaggaccctcagctgcaggtctgttggaataccctgccgtgtgaggtgtcagtgtgcccctgctggggggtgcctcccagttaggctgctcgggggtcaggggtcagggacccacttgaggaggcagtctgcccgttctcagatctccagctgcgtgctgggagaaccgctgctctcttcaaagctgtcagacagggacacttaagtctgcagaggttactgctgtctttttgtttgtctgtgccctgcccccagaggtggagcctacagaggcaggcaggcctccttgagctgtggtgggctccacccagttcgagcttcccggctgctttgtttacctaagcaagcctgggcaatggcgggcgcccctcccccagcctcgttgccgccttgcagtttgatctcagactgctgtgctagcaatcagcgagattccgtgggcgtaggaccctctgagccaggtgtgggatatagtctcgtggtgcgccgtttcttaagccggtctgaaaagcgcaatattcgggtgggagtgacccgattttccaggtgcatccgtcacccctttctttgactcggaaagggaactccctgaccccttgcgcttcccaggtgaggcaatgcctcgccctgcttcggctcgcgcacggtgcgcacacacactggcctgcgcccactgtctggcactccctagtgagatgaacccggtacctcagatggaaatgcagaaatcacccgtcttctgcgtcgctcacgctgggagctgtagaccggagctgttcctattcggccatcttggctcctccgggtcactggatttaaagacagcaacctacaccaaccacatgtggcttcttaatattcctaggattaaaatgtaataaaacacaatcaacaccaacagtcaactggaaatgatgtaatccttaataattagaaaataatgaacaagggacaattcttacccataaagagctaggttacagagttctgcatgaaggtctaacatggaatcatagcagcagcgctccttgcaagtcttccttttataactaaaagataattttagaaaaagattgatcccattttgcggatcacgaggtcaggagatcaagaccatcctggctaacacggtgaaaccccgtctctactaaaaatacaaaaaaattaactgggcgtggtggcgggcgcctgtaatcccagctacttcagaggctgaggcaggagaacggcgagaacccgggaggcagtggttgcagtgagcggagatcgtgccactgcactccagtctgggggacagagcaagactccatctcaaaaaaaaaaaaaaaagaaagaaagaaaagaaaaagattgatcccattttaacttaccttttattatttgtggggatattgctaattgcctccctgtgaccccaaacttcctcaactagcaaattctccgcatctttgcctgtctcctatggcacgggagacccgtgttctacatgctcttgcaggtgctagtctctggggttttgttgacaaagcaaattaacatgatctttattagcaaatgtttccttaccataagcttctggttctttgggtgttaacattaaatatctttattttcaattcagtaactcagccagatgtgctgtctcccctatttagatctatgggtactctgagaaagatctccgaagacaatgacctcatgatacttgaattgttccacatcaggcttctggtcaggaagtgttaacctagtgaggcagaaataatgtgcttttgttatggagctggcagatgaaatattgtgcttgttttataagaaattatatacttaaaactggaggcatttgcagatgttagggccaataagttctattcaattacctaaacaggtatgttcatctcacatgttccactttaatcagggtatctagaatcagagcttcaagatgactcactagcggcacccagcgctagcctcctccacaaagaaagataaaaatggtgagtagataatgatacataaaacagagcatctaggagagaatactgacatgcagcaggaaagcaacagggaatctctgaggcacagagggagaggtaagcaaagaagccaactggccaaaattggctcagagccaggacaaacttcccattgcatggtaaagataaggaagaggtctccagtggtacacatcccatcacagactcctgccctcattggcccagagagtagtatagtgagctgcctggagtccatgcaatagcactgtttcagaaagggagttcacactaggtccccaacacctcccaagatccaagcagctgcagcacactgccattttgagagcctacctcccactagactacatcctgcttgaggatcaacggctcctccattcccacaatattgaagccttgttgatatacccttatgtacacccagaaggcaacagcatcataacactggctgaacccagcagtgtggctgggttccctgcattctaccccatgcagcggaatgaggaattttgagtaaaaagaagttgcagcacactagggaggctgtcccatggacaaaagaaaccaaagcctgcattctccagagcctgagagctgcctgcctgaggccacttcccctgatagcaaatccctccttctccagcagcaggtccactacacatcttaatataccttcagaaggcccagggactggcctgcccatgtgccatccagggtcctggggattgacccaccccacacactgcagccagcatctgagtgcatcattaggggcccagaggacagatttgcctcaggtgtagccctccaacagtggtgcccatatgtatcatccaggaacctaaggattggcttgcttggacccaataacactgctgcttgtgcacactgcccagatgcccaaggataggcatgttcagcccaccatcaccaccactggggcttgcagtctagtccacctggcatccttgtctccagcaaagcctcactactgcttctattagcaactgccatgtaggccactgaaaaaactcacagatggcactgactcttatagccaaagattatgcagagactacattacaatgcccatccagaatcaaaaccaaaacaccctactcaactgacactctagacatatcagtaggaaaaaaatctttccctatgaaggccaatccataaaattggaagaagtgactattaaatagacatgtagatatcaacgtaaggacacaagaaacatgagaaagtaagaaaacatgatacttccaaagaaatacatcaatatttcaataatatatcccaacaaaaggaaatttgtaagatgcctgaagaaatattcaaaatgatgatcttaaagaaactctgtgagatacaagagaacacagataaataatgcaaattaatcagtaagacaactcataatctgaatttcaacaaagagatacatgttataatcaaacagaagccttggaactgaagaattcaatgaatgaaacaaaaaaatacaactgagagcttcaatagtagactgtattagggagaagaaagagtttctcaacttgaagacaaatctttaataataacctcatcagatgaaggaagaaggaagaagagaagaagagaaggagaagagaaggaagataaaagaagaagaagaggaggaggagaaggaagaaaagaagaagaagaggaagaagaagaagagaagaagagaaggagaagagaaggaagagaaaagaagaagaggaggaggaggagaaggaagaaaagaagaagaagaggaggaagaggaggagacaatggcttatgtgacttatgagacagcatagagcaaccaaactttcaaatttttagagttccagaaggagaagagatgagcaaagacatggaaaaactacctaatacaataatagctgaaaacttctcaagtcttacgagagatatacacatctagatacaggaagtgcaaagattcccgaatagattcaacctgaaaagatcatctccaaagtatattataatccaaatgtcaaaagtcaaagacaaataaagaattctaaaaacagcaagagaaaatcatcaagtcacatataagactaattagtttgactctataagactaatagcatgtctctcaacactaactttacaggccaagagagagtgaaatgatacattcaaagtgaagaaatgaaaaaaaaaaaaaaaactatcaggaaaatacaccatgcccataaaaactatcctttaaaaatgaagtgacttcccagacaagcaaaaacttaggaaattcattaccactagactgactgcacaaaaaatttatttaatgacttctacatccggaagaaaaagatgatatgtattatcagaaaaacacaaaaatataaacctcactggtagagtagatacacaagtgagaaagaaaaaaacttaaatattagcactacagaaaatcagcaaaccgcaatgataagagagaaagaggagtttgggaccagcctgaccaacatggtaaaaccccatctctactaaaaatacaaaaaaattagctggatgtggtggtgcacacctgtaatcccagctacttgggaggatgacacaggagaatcacttgaaaccaggaggtggagtttgcagtgagccaagatctcaccactgcactctagcctgggtgacagattgagactccatctcaaaaaacaagtctcagcaaatttaaaaagaatgaaatcatatcaaatgtcttcttagatcactgtggacaaaaactagaaattgatcataagaggagcttagaaaatgttacaaatatatgacaactaaacagattactctcctgaataacccctgggtcaatgcagaaattaacaagacaggaaaaaaaagtattaaaacaaaaatggaaacacaacataccaaaactcacgagatatagccaaaacagtgctaaaaggaaaatttatagcaataaatgcctacatcaaaaaagtagggaaagattgtaaataaacaacttaatcatgcacatcacggaactggaaaaaaaagaacaaacctaatccaaatcagagaaagcggaactaaatgaaatggagactaaaaaaataaggctaaggattgaaaaatgaaaagttggtttcttgaaaagataaatgaaatggatagttagctagactgaccacaaaaaaaaagagatgacccaaataaataaaatcaaaaccagaaaaaggaatcattcaaattgttgtcacagaaataaaaagtatcattagaagctattaggaacaccaacaaataaaaaaacctaaagaaatagataaatttctggccatatacaactttccaagattgaaccagaaagaaatagaaaagctgaatagagaaataacgagtaatgagattgaataggcaatgaaaccaccccgcttcaacaaagaaaagcccaggaccagatgatgtctttactgctgaattctacaaaacttacaaagaagtactaagatcaaatttttctcaatgaatttcaaaaactaaaagaggagggaatttttcctaactcattcaacaaggctaaaccctgagaaacataaatacaaaactccttaacaaactactagcaagtgaaatccaacaacacatcaaaaagataatatatcataagtacgcaagatttatcccagggatgaaacgatgtttcagcacacacaaatcaatatatatattatacatcacatcaacagaataaaagacaaataccatacaatcatctcaagatgcagtaaaatcattggataaaatttagtatcccttaatgataaaaactctcaagcaacccaggcatagaaggaatatatctcaacatgataaagtccatatatgaaaacccacagttagcatcatactgaatgggggaaagctttcagctttttctcaaagaactggaaaaagacaaagatttaccatttctcaagggaaagaaataaaaggcatccaaattagaaaagagaaagtcaaattatctctttgcaggcaacatgattttatatataaataaacctaaagactccaccagaaaattattagaactgataaattctgtaaagttgcaggatataaaatcagcatacaacaatgagtaccatttctctacaccaataatgaactagcagaaaaaaaaaaatcaagaaggcaatcctgccaggcacggtggctcacgcctgtaatcccagcactttgggaggccaaggcgggtggatcacgaggtcaggagatcgagaccatcctgtctaacacggtgaaaccctgtctctactaaaaatacaaaaaattagccgggcgcagtggcaggcgcctgtagtcccagctactcgggaggctgaggcaggagaatggcatgaacccgggaggtggagcttgcagtgagcctagatagcgccactgcacgcaagactctgtctcaaaaaaaaaaaaaaaagaaggcaatcctagttactatagctacaaaaaaaaggaataaatttaactaaggaggtgaaagacaaggaaagctacaaaacactaatgaaagaaattgaagtggacatataaaaaatgatgaccatcctatgttaatggattgtaagaattaacattgccaaaataaccatactgcccaaagcaatttacagattcagtgcaatccttatcaaaacaccagtgtcatttatcacagaaatagaaaaaacaatccgaaaattcatatggaaccaaaaacaattcaagcagccaaagcaaccttaagtaaaaagaacaaagctagagacatcagaccacccaacttcaaaatatcttataaagctatagtaaccaaaacagcatggtattgatataaaaacacacatctaaaccagaggaatacaatagagaacccagaaataaattcacatatttatagccaactgatttttgagtaaggtaccaagatcatacattggaaaaagaacaccctctctaataaatggtactggaaaaactggatatccatacacagaagaatgaaactagatccctatttctcagtgtattaaaaatgtccactcaaaattaattaaagacttaagtgcaagacccaaaattataaagctactagaaggaaacatagaagaaacacagcagaacattggtctaggcaaagattttatggctaagacctcaaaagcatggacaacaaaaacaaaagtagacaaatgggactatattaaactaaaaagtttcaacaccacaaaggaaacaattggtaaggaaaacacctgttgaatgggagaaaatatttgcaaacaattaaacccacaaggcagtaacattcaggatataaaagcaactcaaactcaatagaaaagcaatgaaatattctcattaaagagttaagaaaagtatctaaataaaaaatttcactaaaacagacatataaatgaccaacaggtgtattttttaaaaagctcaacattatcttttgcatcagattaatgcaaatcatcataccccagataaaatggctattatcaagaagacaaaaaataacagatgctggtgatgatgtggagaaaaggaaattctcatacactgttaatgagaatgtagattagtatagccattatataaatcaaaatggaaatttctcaaaaaactaaaatagaactaccatatgatccagctattccactactcagtcattatccaaaagaacagaaatcagtatatcaaagggataactgcacctctatgtttatcacagcactattcatgacagcagagatatgaaatcaatctaaagtgtctatcaacagatgaatgaataaagaaaatgtgacatatgaacgcaaatttaatactattcagccataaaatgaattaatttctgtcatttgcaccaacatggatggaactggaggtcattgcattaagtgaaataagtctggcacaggaagacagatattgcatgttctcactcaaatgtgggagctgaaaagttgatctaatggaaatagtgaggataatgctagttatcagtgactgggctgggtttgcgtttggtggggtgggaataaagagagattagttaatgggtacaaacataaaattagatagaaggaataagttctagtgttcaattgcacagtaggattactatagtttacaataatttgttttacatttcaaaagagctagaagagatttaaaatattctcaatacaaagaaagtatcaatgtttgaggagatgtacaacctaaataccctgacttgatcattacacatgctatacttgtatcgaaatgtcacatgtatcccataaaaatgtacaattattatgtgtcaataaaaaaggaagtttatcaagagctgcaccgtctagctaaatctaccacaaccagaaagctagcatgaatgaacatatgtttgtattttgttacttatccccattttcattttctaaagtttaggagagacgaaagtaatgtaaacatggtgggcactgagtaaccactgaggaccctcctgtttcctcactagagtttctagtaaaagtgaatttgagtctgatctcagcattgtcttagtggagaatacagtggcactagaaggtgcttacaacagtagtaggtgttaacagcagggctgggtacatggggctgggggaggtgggcagtgcaaaatgaaaatacaggggctcttgttcaataatgattaagaatttcaagacagaaacagaaaaacattaaatcaagcataggatccttctaagcatagagtcccatgtgagaagccagccctgcctggaatttcagacccaaggacagcattgtgcaggtcagctctgcacagtttctgaaggcaggaggctgagaatgatccaactgttgaaggagttttactctgagcttctttaaaaagcctggtcagactcaaagcctttatttatttattatcttatttttcttttacaaacttgagaggaaagatcaggaatacattaaaatatcaacagggttatagtctgaagctaattatttattttgtgtaaatactagagaagattcagccaaatggctgaaatcaacccatcgggagtaggagggggagggaagagggtgtaaactgcagattttctattgcgactaggaaggaggataaatcttctccagaaacagctggttgccatggtaaaatggtaaagagagattttcttcagcttttctcttctgattctgaaaaacaaaactgagaatgaagccaaagaagaaacttcaagtgaaatgattgagcttggaccccaagcaaaacagcaagaaatgatctcagaggagggattaactcaggtgtcaaggctggtagatggaacaggcaagaatgcattgctctggtaagcctccaaagtctgggatagccaaataatcactgattgctgggcacagaacttgtgtccagagctgtgctaggcaccttcaatacattatttcatttaatttgtatagcttcacagcaagcttagcataacacatattatcatgctcattgtacagaggaacaaactaaggttaaaaaggtttcataatttggccaaagtcatattgctctaaagtgtcaaactctacctctaaatcttggaaagacatggcccataaagaaaacgagcaagtggaacaagatgaggaatatgttaaagaaattgaggactttgcagaaataatgaaggttaagaggaataaactagaagattaaaagtccaattagagataatggtttgacattagtactcatgccttaaatgttttttgaattgatatttatgttttcttgtatctgttagaaattagctttattaagtatttgctaaaggctcagatctcaagtttttcatcaaaagagaaagtattcacttgctcgcatgataggggaggcaaatgctccatctaatggcaattcaagaacattctaaagctgtgtcatattttaacccacaagaagcaaaccaaggaggtgtctaagtgggctaagtattattcaatacttatattcaacaaactatatattcaataaaaacctattgaacgaatgactacaaaatgggagaactaataagtatacaagtacacatggtaaaagggtcacaagcttcttgtttctgccaaacttgttagtaaataactttaataaagacaatatagacttcaaaacaggtttctctacactaaatattaattatcagccttcaaacaagaatatctcctcttcaaccaagaatatatctgcatacctaccattgtcataaaacttgtatcttgtggtagaaagaaattgggtaactctcaacactcatcgcaacatctttatttctacgaggaatttccatgcacattggttaagaattctgtgtgccaacagaatctctattttgtcatattctaggtttctctcccatttcaaaagtgaatcaaaggcggtgatatagtttgtatatttgtcccttccaaatctcatgttgaaatgtgacccctaattttggaagtggggcctggtgtttgtgtcatggggatggatctctcacgaatggcttggtgccctctctgcagtaacaagtgtgtttttggagtcagtttttgctctattagttgacatgagagctggttgtttaaaaaagcctgtcatctctcttgcttcctcacttgccatgtgatgcacctgctccccctttgccttctgccatcaatgaaagattcctgagtcctcaccagaagccacgcaggtgctgatgccatgcttatgtagcctgtagaactgtgagccaaataagcctcttttgtttataaattatccagtctcagatatttctttatagcaaacaaaatgaactaacagaagaggtaactattcattctttctcattgcaatccaatgaggggtctcagaaacacccattacaatggcttcccaggctcccctcagaacagtcacatgacacctggaatgatgccttcatggagtcatgcagtgtctgctcaacaactgttgctttccattcctcagtaatgacaagtacactggcttctctctctaccatgtccctatctaaaactaaaattttgtatattattcccttggggccatgttctcaggcagctatcatagctgaaaaaggatctgtcaaagaaggctccactgaaatgttaattactgacaatggcataacgcttttcctgctcagggatgtttgcattttgtgagggtcttagaaatagctaaatctcagctagtatatagcccagcgactgtttcatggataatatttaatacaatgtttgaactaaactcaacaaaataatgaatctctagtagtggaaatacaagctgagtatagaagacttacttggacaaagaagttgtccaagtgtaactcaatctccagaattgagtttgagctaactttaattctgactctccacatttgtcagaaattctcacaggcacatgtagatcaatggaagaggacagagatctcagaaatcaacccatgcatatatacatggtcaactcatctttgacaacggtgctaagaacacacatgtgaaaaagatggtctcttcaatgaacagtgtgggaaagactagatatccacatgcaacaaaataaaattgaatccttatcttacatcatactcaaaaatagagtaagcttgaaattgaataaaaacttaaatgtaagacctaaaactataaaatttcttttttttaattatactttaagttctagggtacatgtgcacaatgcgcaggttagttacatatgtatacatgtgccatgttggtgtgctgcacccagcagctcgtcatttaacattaggtatatctccaaatgctatccctccctcctccccaaccccacgacaggccccagtgtgtgatgttccccttcctgtgtccatgtgttctcattgttcagttcccacctacgagtgagaacatatggtgtttggttatttgtccttgcaatagtttgctgagaatgatggtttccagcttcatccacatccctacaaatgacatgaactcatcattttttatggctgcatagtattccatggtgtatatgtgccacattttcttaatccagtctatcattgttggacatttgggttggttccaagtctttgctattgtgaatagtgctgcgataaacatacgtgtgcatgtgtctttatagcagcatgatttataagcctttgggtatatacccagtaatgggatggctgggtcaaatggtatttctagttctagatccctgaggaatcgtcacactgacttccacaatggttgaactagtttacagtcccaccaacagtgtaaaagtgttcctatttctccacatcctctccagcacctgttgtttcctgactttttaacgattgccattctaactggtgtgagatggtatctcattgtggttttgatttgcatttctctgatggccagtgatgatgggcattttttcatgtgtcttttggctgcataaatgtcttcttttgagaagtgtctgctcatatcgtttgcccactttttgatggggttgtttgtttttttcttgtaaatttattggagttcattgtagattctggatattagccctttgtcagatgagtagattgcaaaaattttctcccattctgtagattgcctgttcactctgatggtagtttcttttgctgtgcagaagctctttagtttaattagatcccatttgtcaattttggcttttgttgccattgcttttggtgttttagacatgaagtccttgcccatgtctattaaaaaaaaagaatgaaagctccttgatgttggtcttggcaatgatgtttttatatgacaccaaaagcacagataccagaaacaaaaataaacgagtaggattacatcaagctaaaatgcttctgcatgtaatcctaccactttgggaggccgaggcaggtggatttcctgagctcaggagttcaagaccaccctggtcttgaacccccatctctactaaaaatacaaaaagccaggtgtggtgatgcacacctgtagtcccagctattcaggaggctgaggcatgagaactccttgatcctgggaggtagaggttgcagtgagctaagatcatgccactgaactccagccgggtcaacagagcaagactctgtctcaaaaacaaacaaacaaaaaaatgcttctgcagagcaaagcaaacagtcaacaaaatgaaagggcaacctacagacttggagaaaatatttgcaaaccatatatttaataaagagttaacctccaaaatatataagaaaccccaactgctcattagccaaaaaataagtaacctgatcaaaagaagggcaaagaacctaaatagatatttctccaaagaagaagtacaaatgggtaacacgtacatgagaagctacttaacgtcattaatcatcaggtaaatgtaaatcaaaaccacaatgagatatcaccttacacattgggatggctattaccaaaaaggtgagcgataacaagtattgtcaagtgagtagagaaaagggaacccttgtacactgctggtgggaatgtaaattgttacagccattatgtaaagcagtatggacatcccttaaaaaattacaactaccacatgatccagcaatctcccttctagttatacatccaaaggaaatgaaagcaacatctcaaaaaatatttgcattccatatttattgcagcatgtttcacaatagccaagatatggaaacaacctaagtgtccatcaatgggaaaatatggataaagaaaactcttatctagccataataaggaagaaaatactaccatttttgttaacgtggataaacctggaggacattatgctaagtgaaataagccagacacagaaaaaccaatattgcatgagctcacttatatatgaaactcaacagagctcagaaagtcaaactcatagaagcagagagccaaatggtggttgccagcagctaggggagtggaggaaatggggagatgttgatcaaagggtacaaacttccagttagtcacaatatgagtaagttatggggaatctaatgcacagcagggtgactataattcaacaatactgtatcatttactaaaaatttgctaaaagagtagatctcaagtgtccacaacccccccaccacacacacacatacacacacatacaatagtaacaatgtgagatgatggatgagctaattcattgtggtaaccatttcattatatacatatatatatataatatatatatataacatcatcacatttacaccttaaatatatatacaatttttgccaattttacatcaatgcagtggaagataaaaataaaatgaaatttctgcccgacatctgaatgaaattccttccagcaaaatttaacctaaatcctttcctacactgcttcatagaaaatgagcaaagggcactgctttcctatatacaaaacttgtcttatatttgaatattgcagtactggagggagagagagattggtttattatccaaatgaaatatttacccacaagaagttcttctatatataagagtatgaagcgatccaaatatataaagctaatattgtttcaaattagcttctatcacatatttgattgcttatggcttttcactaattagttggtagtaattatacaaaaaaaaaacctttcactctttattaaggaatatgtttcaagaacacatggacacatggattcagttttcttgggtgaaacgtaacaaaaatcacactctacttgggttccaaagagctgcttttgtgttctggagtgtcttagttgtatgacctcaatcagtgaatttgacttctctgatcttcagtgtttttgtttttgttggcaagatggggcattttattattttaaatgatgtagcacctactttaggacaggtaccggttagacttcttgcaaatgtgaatctatttaatcccagggtacagtactattatcagacttgttttgcagattaaaaaaacagggaacagaaaggttaagtaacatgcccaaggtcacatagctgacgagaaacagtctgggcttgaatccatctgaagcagtctggctcccgtgtcaggctccaatctggaatgttaaccattgcacatggcacagcttctcacaaactggaatcctgggtcatgggagtatgaaggaatccacattcccaaccaaggcttaaattgcagggggaatgtgatctgcctgacaggcagaggtcctgaacaatgcctgagggatgaggagggtctttattacatgattacaaaaatttgagttcagtcagaagcagtccatgagacaagatgtaatttattcacgaggtgaccatagaaaatccaggtagagaaggggagtggggaagtgagacagggaagggatagatgtcaaaccagcatatggtcatgaatgtgtcaccacctgggcaacaggggctctatcctactgcagacctttgggacacaggttagcatacataaaaacagtcccacctaaggggcaaggaagctgagaggtttagcaaccacctcgcactcctcctcattggaggatatttctaggggcattaactccctggcactgtgggtgatgccttctcaaagacccacgcaggcttctatgagcagagacacaggtgctgcaacaggagaaactgtaaatgccagggcccagaggaaggactctgacagcatgcatgacaaagcacagggagcagatacaaattagtacacccatcggcttaggaataattacgaagtcttctgggtgcaaaaatgctgttggccttccctaccctagcagggcattctctctcccctgaccttcaccgctgctggttatcagcatcgcttgcctgtagagcgtgacgagtaataagttaagagtttcaaggattagctcattcattcaacaagctgttatttttttagttttctttttttattcttaaaaaaaatggtgggggggatacatgtgcggaacgtgtgggtttgttacataggtatacatgtgccgtggtggtttgctgcacttattaacccgtcctctaagttccctcccttcaccctccaccgcccagcaacaggccctggtgtgtgttgttctctgtgtctatgtgttctcaatgttcaactcccacttacgggtgagaacgtgtggtatttggttttctgttagtgtgttggtttgctgaagatgatggcttccagcttcatccatgtccctgcaaagcaaggttttattaggcacctctacgcaccaggaagtctttaggtactggtgacacaataataaaaataaaataaaataaaaaacaggcaaaagtcattgcccacatggagcctacattctggtagaggaaacaagaatcaaatatgtaattaatatgtgtttatgaaatgctggacagtcagtgtttggggaaataagaagcagaataaggggattggaaagtgccctttgttcaacgtattaagtgtaatggccacagaggacctcatcgaggacaggaggggacgtttaagttgaaatttgaaagaggggagagagtcaaccatgcaggtaactgggggaggggagttcgggaaagaggacaggaggggcattccagccaagggaccacctgaggcctgtagatgaatcgaggagtagggaaggatgtggctatgtggctctatggaaataatacatggaagaaggtaggagctgagattggagagataagcctgagtcagttctcaggctctatgggactctacatggacagggagaaaaggagagctactagggggatggcatggcaggaatttaaagagctcactgtctgctgggttgagaacagactgtgaagggcagaggatgaagtagtgagttcagttcagaggctgttgtggtgatccaagtgaaaaatgagaagattgtgccagggggtggcagtggagatgtcgaacagaatctggctgtatggtgattattgacacgacttcccaaaagtctagatacgggataagagaatcatagagcatcatagaacataacgccttagggctgctactctagtcccaaactctcatgttatggttgaggaacctgagcccagaaaaacggagactttcagttacttgcccaaagagttagagttacttgcccagtcgagctgggagtagatgccagggcttctagtttcagtgaccactgacaacaactgactacttccagtaatgggggacagccacttccctggacctgagtaaaaatctaaccaggtacagacctggccacgaataaggacctaaaacatacatgcacccctgttgggcctagtcctgccacaaaaggcccattctctgtttagagcagtgacattttccttggtagcagtactcagtcccagctcatagccatgttctcatgaatgatataaacagcaggcttcccttttaatttattgataaataataaagtctctgtaaaatcttggcgtcttctcatgacagtaatggtgcatgtactgatgggaaagtccccagcaccaagaataatgcattctattcccctctcctcagttatcactttgacatttctcacaaatgtaccttccgctcctctaataatgtctatagagctatttggctgtcagcagcaaagcccccttgggtaatctcaaaactctgaagaaaagaagacttggttcccccatgatcatcaaaatctatttgatctaagtctggacgctttgccaacaacacatctatttatgtataagaaaagaaacctcacaacaaatatctacagactgataaagtgtttttccactcacaaggggctaaattaagggtgctggctctggaatgaagccaaagtcatttggaggaaaggccattttctctcccccactccttggcactgccgtgtgtctcttctttcttcttatgaggcatatttaattgataggaacaccaattcatcaaatataacttacagttgtgtagaagatgagatgtgtgtagttgttttacaaaatatctaatttcctgtttggctttttcttaatctagtaaaagaatcagtttgcattctgtgagcatccacacatcagctagcagaagaagcctccaaaaagcctgctgagagacaggaacaagtttttcttgactcaaagccagctttattcattccatgaagctgctcactctgctttcacggtgactttaatacagggttcctctttgccaaatagtattttgaatatcacattttattccaaagactaagttcaagctctctctctctcccaatactgatacagaaaaacaaacttgagtctaacagatttttctaattattctctcctcttgcttcccctagctctgacacccttgccaacacattctttttttggcaggtaagaactaaccaaacggtatgtatctcaagttatgggacactgaatccaacgctcctgaaatctgaagtcacatttgtttctgaaaacataaacaacaagcttccttccttatcttgtactcttcagttactcaagatacttgagaaggggttcaaggaggattctgtgtctcacgtttacctctgctgataagaggtgctcttgggaccaagtaatgctgtctctgcttaactgactcttaatttggagaaagaaaaccacagaaactcagagaggatgtgctagaaattgggagacatgcccagtctcaacaagtaaagtgatttctatgagaggagtttacgaatacgtgggagcagaatctggatttgaaagtgacatgtttacagggagatgagatgctcatgcctgcttaaatacttctgtgtggttattaataatccccaaacataactaactcacaaggcatatgtttctgttacagtgaaatcaactcaccgtatcatcaggcaggataacatgcaaagattatccggagccacccggcattgtcagtaagcggccaactttagatatgggtgagcaatggtgctgcttcagttcctagtgccagcacccaggaatctggcactgaggaaaggaaataaattagatcacagcccaggtggaatagttgttctgctgggcagccggatgggtcccagaagaaagcatgtgccataattctgctgagtcctagcagagacaggctatgttgcagtaaatgcttccaatacgacaaatctgtgattcaggaatgggggaagacaggattttaaaatgttcctgtgtatctgtagcattttaagcaagtcattccacttgcccttgcactggcttcgcaaactgctcactcgtcctcccatgcataatcctgcttttggctccatttctttttcttcagaaaatcagcttaaaagtaaggaagttatctgggaagagtggcatagtcacccatcaccactttaagccaacagtgacatgccagaggtaattgaagctggacaggaggacctaggtgctaatgatgacccttgacaatgaggcaccctgggaccctgccacacaaagtgttatttattggcagcaccgtcaccatccctcacagtttactagaaatgcaggatgtcaggggcaccccaaacctgttggatcaaaatcttcattttaacaggttgcgcaggggatttgtgtgtatattcaagttgaagaagcagtgttctaagttacacgggatcattagaatccaggaaaacaacttcagaaatatgatattggaagttgcagaaaacaaactttttctacttgatcttttctccttaggggacatatatctgcttatttctattatttctctaaatgactatatctgccagaaatctttcagatgtaaagaacaaaaataaatgaaagaatgaagagaaaaagaataacagataaaaattaaacaggtcaaaggaaaactaggaatacactgggctatacgacaaaatggtcatgggcacgtaacttcaggcatgattgaaaccaaacctgtcatttggaatttggtctttgactcttggctcttttcttaacataagcatcttataaaagcaaactctctcaacaggtaccccttaacgtggccaatagctttactacaatagcaaaggaacaaacttcttttccaataatttaagcaaaaacatctgaggttcactttaataagcccgattaagccaagtattcatccctggagcaatcactatgtatctgattgggcaggtcgggtcacatgtacatctcttcgtcaatgggataaggtcagtgtccaattacctgtgatttttttaaaaaaatataatttccagaggaaaaggcagatgctcttacttgaaagagagggaatgggggttaggcaggccagaacagcagatgactagtactttgttgtctttgatgtttatatttctagcagaatttgttgcaatcccactttgtgattgggttgctccaagatgaatagtgccagtcctcacaagagagagacactagacctctaattattgtgcaaggccaagtgaatgcacaagctgcctgctatggattccagaacagggagcccaaaggaaagcaagggctaagatttggagacatgtgaccaaatcttagagtttgggatgtaaaccaataatgaattgaagctagcttgcaaagggcatctgtgagtgtgaacttgctaatgagggggatgacatccagggagagttttaagaagttaagtttgacagcaaatgtgggagaattacaatggtggatgaggaataaatcttatattttaatcacccttcaggtgaaaaaattaagattcttcacctaagtacttgcatctaaactgacttcagctggccataagagtccctaaacaataagagaatagttattggttaaagacagttctctattgagaaagagttatgagaactggttaaaagtcaatactcaatacctgttcattgattaaataaattttataacaaattttgaaacaatcctgctttaacaactggacattcagttgatgtagattatatttaagtagagggctgccctttttcatggaacataatgcaataacattctttggtctcaataaaaatagtaaagactacagaaggaaaaaaagaaggaaggaaaaaaggaagatagaggaaaaaagaagaaaggaagggagggagggagggaggaaggaaaaaagagcaagcgggttgggaagaaatggaaagaaaaaaaggagagacagggacaaagctgtgcaaaaaagttatttaaaaagtctgatagggttcacagcattttctgtgaatcgatttcccatcagagctctttagacagtccttaaacttgtgaagtcagatgtcactctaagttcaggcctcctctgcatttgagcttcacacttacagttctgacagccatctgcagtgtgttcagaacattttctgaaggtgacactgggaaaaggacagtttcctaacaggacatgagattatgtgctgtggatcctgatgggaggcctgtccttctgctgagaaaggcctttagtgtgttgacatgtctttgagctttcatgggcactgggctggtctctatcttcctgagggaaccactgaccactcccaggagtgaaggctgtcagcctcccactgagcagtactccaggcagcactgggcctctcaagtcttcagttttcaggaagctagaaataaatactgcaaaacaaaggagcccgagattgataggcctatttattctggggggggtgggggatttccaagctggactacctcatccttcccagtgatgaacaaccacatcctcagagaaacccctttcttttcatcacacatggtatattcctagtacattctgcaatcagtgctgctcttcaccatctgtccatggctattgatgtgtgtatgtgtgtgttggtcagatgccctgatttcgttcttgaatctttggctttgacctttcatttccactcaggaggaatgggtctgagttttcacagacaggacatgatcaataaatgaaaactattcacttggccccaaaaatctgactttctggaaagttactaaaatacgtgcaacaatctgaagattcattctaaaatacttcccaatacatattttacagtgtacacttttacttgtttttatgtataaattttttcaccatcattcttgacagattaatatttttatttatcgtgccaccacagactagtcgtctgtgtctgtgtgtgtgtttgtagtttgtgtatatgtggatcatatgtttatgtgcatgaatggtgtgtgtgtgtctgtgtgtgtgtgtgtgtgtgtatatgctgtgtttggggcaggatgggatgtgtgtaattttggtgtgcctgtttaaggttgtgtgtatatatgtagtatgtatgtgtttgtgtgtattaatatatgtgtagtatatatgtgtgtgatacatgtatgtgtttgtgtttgtaggactatggaatgtgtgtatatatagagtgtgggagagtttacacatatggtgtgtgtgtgtccactgtgtgtgtgtactgtgtttgaggagtatgcggtatatatatcagaattttgtgtatatgcatttgtgacttccttaatcatgttttgatctaataaagagacatcttaagaatataagaggacattgctctatttcatattttaaaaatctgtgtttgaagtaggttttgaatatttgttttcatacacaaagtaattattctggtgcatagccaaaggcagccatcttgaacttttgggaaaatgtccaaaataatacttcctaaaagctatttaaaattggaatggacatgccatttttagctgtccaaagggatgatagaaaatagttgatggtgtgttattttagagggagaaaaactattaaaatgtttctgacggtagcaacaataaaatactaatgagccagaggaacagatggaaattgaaaagcatgtgcaatgtcaaaacccaaaatacagtgatttgttaaattacagggcttcttcccccgggagaggagctgcagtttgctgataagtcaacgacaaccaggattattactgtaacacagcaacgccattttccgcctgaaacctgcaagaactaattaattatatagctttggttactaggttagaaccaagcttttctgtctggtttccaaagactgaactttataaattgtcagaagaacagcattctcctaattttctgctaactatcgtagatagttacaaagactactatcaattgctaggagggaaatatcccatgatagattctgtttgctcttttgaccatttggaaagactcttttttcccacagctttttacatactgaagatacccagacgtctttagtgagcagaaatttatagtgctgaattgcaactctaaatataatgtgagcatcaggaggtgagtggctactaagaagggttttctaataatgccagctgggcttactaggcttacttgggtaatggaaagaatattgctctctctactcaaaacaaaagaccccaatctactccttaataaagacgcgcgatgtctcacgcctgtaatcccagcaatttgggaggccgaggtgggcggatcacaaggtcaggagatcaagaccatcctggctaacacggtgaaactctgtctctactaaaaatacaaaaaattagtcgggcttggtggtgggcgcctgtagtcccagctactcgggaggctgaggcaggagaatggcgtgaacccgggaggcggagcttgcagtgagccgagattgcgccactgcactccagcgttggcgacagagcgagactccgtctcaaaaaaaaaaaaaaaaaaaaaagtgaaattttagacgcttcctgagtacaggcaaataggaaattatattctatccattataaaagagaagaatctccattgttttgttttttaccccagaagtagttgggaatcagaaaccaaactgaatcctgtagatgcaatgaaagcttaggagaagcagacactggcttggagcctcctgtggttcctggagtctttcctctctccctatacatttcctttctactcaagacttgttttcttagtgccagagaaacaaacccccttcattgcccatgggagagtgaactcccagagccacactgaagagaagcttgctaagattccctaaaattgtaactgtgtacatttatggcccagcaagtgtacttctcgaaatcttacccagagaaacacacatctatcacaccagggggcttgtactagggtagccaatacagtattgttagtaatagatatgtgtttaccaagagtggaagggctgaataatgtaagagtatatttaggccattaaattatttgggaaactttatataagatagatttattttagtaacaccagaaaacttctaaaatatagtgttgagttgaatgaatgcaagtaatggaatatatgaatataatatagcatgttttaaaaggaaatctgcacatatatacaaaacaatatcatacttttacaaatgtaaagataaatacacataaaatggtctggaattagttctattgaataataaaaataattattctctatgatggaactgggtgtggagatggtggtcaagttggatttagacttatctcactaggtatgaaatcctggaaaagctacttactctgacttggattctttatctgtaagatgataattgtttttaaaatgcctacgtaatagagttgccatgaggattaactgagttaataataacaatacatacggaacacttacttagagttcagaaatgctctaagagctttacctgtattaccttgtttagtataaagcaggtagaattattatgtacattttacaggtcaagacactaagggacagtgaagttaaagtaacttcccaaaagcctcataactcctaagttatgagaaaccttcctaaagccagagggtctcagacaatgaaagtcttcaaaatgaagcagttaaataaagaatgaaaggtcttgaagcctaaaggtatttcctgaagtccatgagccttctttcattggaggaaaataagtttggatctatttcccagctgaagaaagactaagaaacccgatctataatagcatattgctctagcaactaattaaacagaagacagacagtcttccactcaatcaggtccaaaattttggggtgagtttgatctctccttttcctgtatccactgggacagattcaacaattgatttcaatgcgtcacccctctgtggcctcatgttgggctgagtgcgcctcctcaccttttaactttgggcttattcatgtgaattactttgttcaataggatgtgaatagtcttaatgtgaacaaaggcttaaaatgtgcttgtgaagtttggtttgtccttttgcacttgtgcgctgttatgaaaaaaaatatagtctggatatccactgttcctccagcctaggcttggaatgagacaggtagaacaaacatgaacttaaccgatagcctagagacaaatcctgctgaatccaaccaggatcagccaaactctaactaactgaaagtctcatgagtgaaaaaaagtgtggctatacgctactgaatttctgatcatttattgttttcattattgttgttacacagcattattatagctttgctgacagatatgctcgacaaatataatgccttcttttttcagtgactctgaaagctgtctctccccttgccctggaatagatgctttaattctgcaagtagacagtttgagaagatagccttcaactgcttttcttgcttatattatccatctgttccaatcacagatcagtgttgatgattgactaatctttctagagcctagttttgctactgtcatttctctattccaaaatcttcactgactgcctagtatgagatactgtccccacactgctctagcccttgccagtacctgctttcttatgcttctatacattttcacatgcagtttcccctgcctagaatgttcttccatcagcccaccatttccatgtctcttattcacatggctagattttactaatgattgaaagacttcctctaatttctttgagtctgccccttcttgaggcactcctgttcagcataaaccttaccccttccccaagtatatatgcacacatgcagcaatcacacctgggtctcttgaaatagaatattcttttttaagctcttacaagctcaccatcctatataactatatatatagttatcctatataactatcctaattgtttgcccccagtgaaggccacaggtccatgggcctgtaagtacttgtcagacaacacttggttaaactacggaaacaaattaatccctgaatttctgaatctgttctatgatacaaatctcccattgcacatttcaggtttagagtattttcagtgcacaatacgggttcatttcacactcatgttataaaatgagtcagttggagttctactccatgtgatcactccaggacccaggatagaggagaccttcatctcaccacttgttcccacaatttcactgtgggtaaccaatggagctgggatttgaacaaggcaaatgactcccaaatctgttcttttacccactgctttatatgcctctctaatcaaacacattcccatgaggatacagagaaggaattctcatgtaatcaacaatttgcaaagcattttaaatttattttttaactcttactgtggtactaggaaagaagtattattattatatacatttggctataaggaaataaaatttcttaaggttaagtagtttgccaatggtcacataactaaaaatatgccagaaacagaattcagaaccatagctaaatacatgccagaatcagaattcagaaccaagattgtttgacaggtttccaagatattacctagaatatagcactcaaggatgagaacaaaaatttattctaaaagccaagggagataagggaatgccaacttggagataatcaataagggaagccactcacacacacacacacaaaaaacaccccactatttcaagaattttcccttcaaaagaattaaaaatactaataaaaatgttattctaattacccatatctgatgaactatgcatcaagtagcaataatatatgcttgatcctcattatttgtggatttggtatgtgctaatacatctactcactaagactcattagtaagccccaaatcaatgtccatgaagctttcacagtcattcatggacatgaaaagagtgatgaaaaatttgagttaccagacatgcatgtttccaactccagccaaataaggtaacttcatgctttcttatctcagctctaatactgcaaacaagagtttctttggcaatctacttaatgccatgtttttcacgccgttgtgcttttagttgctgatgatgctgtttaaaaggaccccaagcatagtgctgaagtgctgtctaactgcaagaagtgtttctacatgcaagaagactgaatgtgccttatggaaaacatacatgtactagataagtttagttcaggcatgatgtatagtgctattgactgtgttcaatgttaataaatcaacaatatcatacatttaagaaaaaacaagaaacttgctgcttcagcaaatgctaaagtaacatctgcagtgtatgacaaagttatggaaaagatgaaaaagcagctaatttgtgaatttagaagattacatgtgataaaaatgcataatggacagtattgtcatgaggctagaaaccaaagaaatttatggtcatgttactccgggccaggaaaatttcaaattcttctcagctattgctggctggcttacatgcttcaaaaagtagtattgcatgaaaaattttaaatatgcagtttctgcaggtcaagaggctgcaaaaaaatttgtttaaatagttactaagtgctatgtggaagagtagattttcaatgatgataagtctgtcttgtcttagaaggatgttatcaaatgaatctatataacataaaagaccaatcaatgtttgattgatgaaagcattgtgatcagaggctctggggaacttaaccctgcatttcctctaggagcaatagttcaatattagctaattcagtgtccatggtaactttgtagaacataactattgtgaataatgaaaaccaactctgcgtgtgtgtgtgtgtgtgtgtatgtgtgtgatgtattagattgttgcgcagcactttaaacagtattaagagtttcctggagatgggaaatctgtatggaggtaaggtcgaaattatatttccttttattgctcttcaatttttaattcatattctaaggtgatttctaaattttaaaaaagagttcttagattcttagaagagaatagcaataaaaatacaggtgtgtatgtgtatatacacatattatgttatatagattcatttgataacatccttctaagacaagacagacttatcatcatatgtgcacacaaatatattgcttgtgtgtgtctagtattaactgaaatttttttctagtttctgcatgtaggaatttaatacttccaggttaaactctctcattgcatatgttaaccatgcggtattttcacaaagttctctttttttttttaatcttttaatcttatgtcatttccaaataaattttttaaattagctaacaaggaaattgtggccaatagtattttttaaattactttagacattttggggggttttggagtgtttgtttttaagaccttagctgtttttaaatgaaaatgaaagtgatttggcactgactgtattcctctaagaattattgtgattggaatagatgcacttaagtctcagtgggtggctaaatatttgttattttttgaataagttagacttttccatcttttgcaaaaatatcccatagggttctttatcaaagggaccatttgcagccttatttttttctttttttgcagtgtgtgttattaacacaaaatctgataaataagtaggcttcctcttattcacatggatcctattctcttctatgaatctaataatttttttaaataaaaaatcaccttagaatataaattgaaaattgaagagcaataaaaaagaaatataatttctgctttatctccatacagacttcccatctccaggaaactcttaactgcagtttaaaagtctgtgcaacaatctaattgttctacttgattgcaaatcataggatatgcaaacataaaatgaacctatcccagtaaatgtattatcaaaatattttaaatatgcttgcacagaggtgatggagatgttatgtacctggatagaaagaaaacaaggaaagaaaggctttcggcagagaccttggatactctagattgtaataggaataaaactgccatgagtctgtagatatctggccatgcctaataaggggatggtagaggagggggggttgatggaccttcggaaatgggagcagaaatttcatatgcataagtgaaagcaacacatgtccagctctatgtattgaggctgtaagaaccaggcttctaggatctagattctaggggcaggagacctgagagaaaacatggaatatattgacatagcagccagttattgcctcacttgtattcctgtcttatcatgtcagtccttgccttccaaatgccagcaagcatctgcttttgtttgcctgagaaatcctcagacctccagagcccactttgcacacaagtacaccaggtctgaattcttggggaatgagcaacactctcccagcagtcttcaacaaatgaatgaggcctgctcacctcaagaaagtattgaagcagactggttggggactgtgaatgaagcaactgcttggggactgtggtgagctccctcgctgaagtagccagctacaactagctacagcctgtttgatttcatttggcagtgtggcctttgatttgtccaattctcttgtgggaaatctgatttttaaatatttataattaatttaaacttctttttttaaaaacaaatcatatttgtttatttgatttttttggaaatagagtctcactctttctcccagtcttgaatgcagtggtgcaataacagctcactatagcctcaaccttccaaactcaagggatcctcccatctcagcctcccaagtagccaggactgcaggcatgcaccgccatgcctggatatatatattatatatattatatatatatatatattatatatattatatatatatattatatatataatatatgtcatatatatgtcatatatatgacatatatatgagtcaggggtctccctatgttgcccaggctggtcttgaactccaaggcatgagcaatcctccctcctcgggctcccaaatgctgagattataggcatgagccactgtgccctgcccaaacttctaaaacatacaaaacacactacacaaaacatcaaaaaaccttaggtggcatctactaaaacatatgtgtataaaccttatgaccaagcaattctaattcaggtggatactcaagaacactacgtaattagagcatcaaaacacacacatactgtaatgttcacagaagcactattcctatctccaaagctgaaagggtccaaatgcttataaacagaaggttggatagatacattttgcatttccatactatgggatactatgcagcagggagaataagtcaatcagtgctacccaccacaaaataaatgatgctctcaaacatcatgttgaacaaaagaagccacaaccaagtataccctctctgtgaattcattcatataaaatacacaagcaggcaaaattaatatatgttgttgagcatcaaaacaggagttcctattccaagtcagatcttccactaggatttcataagtaatgatatatgctttggggttaaattatttctgtctcttttaagctgtaattattcctgggaggttgataacatgattctataattcattattactttaatatggattaggtaccaacattgacagaaggcctcctattagagctcctagctctgctaggaactatagatacagaagcgaacaagtcagaatccctgtcccgctgattggacaatgcctaaagcaaaccttgaaatcatatattaatttatatagattttgattgctgcccattcacttctgaaccagttgcagagggctggacatatgagattatactcatttgcttatgctcaaaccttaggagtaatactcccttactttgagtttcccaaaaacctaccctgaaaacaaagagttaagtgaaagtagcttatcgtggagacaattctggaaaacactagtgcaggagtgaggtatgagggaggaaagacaagtctgaggggtgagggagctggagtgtttatccaactactcctctgagtcattagtttcagactggtattacagaacattacttctctccaattacctatgtgacaaagaaaagtcaaaggaaactctcagaaaaagaaatgcaaaaactgccagctggaagtcaggccaaatacaattttcagcaaaaggaccagaacccagagtacatactataagcatagagatcgggtttcggtatcctccatcggctacaactacccaaaaagaggcagttcctcaaataaacgcataggtccaggtgagaagggaaaagagacaaaatgaatttcaggtaggcactcaaaccagtgtctactgcacactcaaaccaggagtcagacatcaaacaatgaaataatcaaaagtgaaaacaacatactgttgcttatctctgggtcctctccaaggatggccaacctgggtgtctacactcatctctggacagctcactttccaattccctggttaatgcttagaaagaaagtaaccctacaatcttccccactgggcgatttgaacccgaaataatttccttgagtgcagaaatccaaacttcatcttgcccgacaggtgtccctgcagcctgtgtgattcttccaccagtagggggcacactctctcacaaggcagcctcttccatcaccagaaagtcttccttattctgtagctctggcatgatcataaaatctgcatccccatgacttccatcatgctcccctctgttgccctctggcccattgctccctcctgggcctgtcctagactccagttccacctctgtagtgtcactcagccatatccacaagtgccttggaccagacattgttttcacagcatggtaggggatgggtagatttttctttcattcagtctctacagatgctttacagatgagctcaatgaggctcagaaaggttaagtaactgggccaggatcatagactgactagtgagagaagtgaggttcaaacacagattatctgactccaatataacccactgagtatctggggtgggggtgtggtgtgggtggtgtgcatgtgtatgtatgagtgtgagtgtgcatgcatgcatagtgtgcatgtgtgtgtatgtgtatgtgtgtatgtggcttctcactatcccccacactaccacccccaagtccattgagtatctctccattttccacacctatccctgactacctcatgcaatgagattaacctccacatcggcagcccttgaatctttcaccttcccccagcatcaaaatacacttctttggggtctcagcctccagagtctgtgcctgcccaccaaaagggcaatgggttctcccaatgaagcaatgaaggcctgtgtgataaatgactgtgatttctctccaggttttaacttaccctcagataatgccttcatgcagagacacagctggggtgggaatttctgtcactggagtaggtgtaggagaattgggggttcctttggagatttgtggtgcaacccaaataacatcatataacacatcccacctactcaacctataggctgagatcccacttaaagggatggtagtttgccctaaggagccacagctaccaggctgcaatgaagccctgaatgccctcagtgcactggggtatacattagagcccccctgccatgatgtttgggattcagtgtgccccttctttttaagtcacaaaacagtcccatccctgctcttgtagattccccagacagatatcacagaccagttgtttcctgacagaattttcctcctccttggaaatcagtgcagaagggaagaagcagagctatttccataagacagtgcttgtttttgtgaaaaagagtaaggagttttagtcacacaggggcctgttcaaagctgggctctgtcttaaactaatgggacaatgtgctagtttctcaaactctgagtctaaagtcccatgtataaaagagaataaccctcaccagctcacaggttgctatgaggattaaatgttatgatacctatggatgttccatgcatgctgtaatactcaaagttgcttttcttttcctgttataaaagcaagtccccactttccttctggtacagaaagaaagggcatttcaaaattaagggttctctctctctctctctcatatttttaaaagtaatgtatgagacaggaatacagtccttccttggcagagacagctagtgacagccatgtgttttatcagggcaaagaactccccagtttcccaggcatgttctttacattgttcttaactgttgttcatttttgtgctgtatcttccagttcacaatctaccagactccatggcaaaatctgccttcactcctgccaaaaatgatcattttctccttctttgcttcccaatcgactttcctattcattcctgatgtcacttgaaaacttagctgccctccctcatctatgagtcttaagttcagcctcctactgctatgatttttcttcagcatctgggttgcttaacttactgctgccaggggggatacagatgtgcagcagatgccaggctaagtggaaagagtgtgtcaaatggaaaatgtattcaggttgccgtatggatggtagaatgctggtttttttccagacctctggctctggaactttgcagaaagttaagattttttgaacatcttattgaagcataacatacaagcagaaaaaaatatgtatatatcacaaatgtgatatatatcatatatgatatatatcatagcttgatgaattttcagtctaagcacacgtgtgtaaccactatccaaaccaagtaagaaaacatgactagagctctattcacccaccactgtcatttccccaaggataagcactattctgacttcttaacaaaatactttccatcatcagtatatgcagggaattggctccaggactccagggaatatcaaactccacatgtacccaagtcctgcagtcagctttgcagaacacacctatacaaaaagttgaccttctgtacacatggggttggcatcccaggaataccgtatttttatctgcatttgtttgaaaaaaaaatctattgtataagttgacccatgcagttcaaacctgtgttgtttaagggtaaactgtaaatttgtttttgaattttgtatgaataaaattctccatgatatactctgttctgtctggcttctttcactgaatattatgtttgtaagatatagtcatactgctgcatgtcatagttgttcatattttctcattgctgcgtgtagttctattgtataaatatgccactatccatttcatcgttaaaaaacatttggaatatctccagagtgaggcttttaagaaaagctctgctacgaagattcttgtgcacgtcttatattgcatatgtgtgttctcttgggtacatacctagaagtagaattgctggattatagggtatccatatactaaactttagtaaactaccagtttccaaaatggttagaccattttatgctcccaccatcataggatgagagtttcagatgctctgtgtcctcatcaacacctggtattgtctatggtgttttgattttgccttatcttcttatttgttttttggcattctagtggatgtgtaattgtacctcgttatggttttatttggcattttccaaatgatgaatgaagttgagcacattttacacatatttattggccatttgtgtatcccttttgtaaagtgcctattaaagtgtttcatatatttttaaactttttaatactgtatttttaaagttttttattaattaaaagatttaagtttttatgtaagactagaattggagagttggtcacactttaatggacttttctatcacttgtcctgattttataataactataaatgtctccagttatccctaatggcatctcaaattgtcagaaatttctccaagcaatttacttttattcaaatgtgcactctatagcacttttagaaaccatggatggatattcagaaacctagtttttgttattttattttactgaatagctctgtgaccacaggcaaagatttcattcttctttagtcttagtatccccacctgaaaaatgaaaaggctgaatttgagatcgtccatctctaatattctataacatactaataagtacgttacttggaagggcaaggaacagggtaaaagagatactatgaaacttaaagaattcccataagcttggtaacccttgctcttgaatgaaaaatctgcaaaacattctaaacctcaatttcaaaatttcttccatcttctttcatgtcttaaattttacccaaattgtgttttccacgctaggagaaatattgtatcaaagctctagttatccttctcttcttcaaaatttttttctttactgcaaacagtaactggatcagaattgccactctcctcaaaataaagcagctcagtatggtttggttttgttttggggtgtgtgtgtgtgtgtgtgtgtgtgtgtgcgcgcctgaaatggaggcaaagaaaaaaaaataaaacacttatcttgcatgacctaaccatagaaccctggaccagcctactgcacctatcctactttctatatacttttgcttccttgaacagatccttctaagcactcaaaagtaaaatgggtgtcactaacctgaaatccacagtccacattttctctctccccttcctcaatagtggcttaacttcagctgcccgatggtgaactgttgtatccccaccttaactggaagattttacaaaatagcatttaaaaagtctttacaacttcagtgaaatgaaagatttcatataacaagacacaaaatgccataagcataggggaagtgattaataaattagacaatgtttaaaagaagaagcacgttcatcaaaagacaccatcagagaaagaaaaggcaaagcatagagggaaaaggatatttgatacatggataaccaacaaaggacttgtggctagattattgttttctaaaaccttacaaatcagtgagaaaagatagacaacccaatagagaataagcaggacctgtgaacaaacactttaaaaagaagataaataaacttataaacagatgcaccctcggtagtaatcagggaaatgcatattaatacctccgtgagatgctactatatggacaccagactcatcattacttaaacatgcaaaaatattgaatgttggagagggtatggaacaatgtaaattcttatacttgctagtgggagtgtaaattgggacatctacctttttacgggcagtaagacacagtctaatagaattaaagatatatataatctgtgtgtgactcagtaattgtactgctaacgcatagcctacagaattgcatacatatgtgcatcaagatacatgtactaatttataagtgcatcattcacaagagcaaaaagcaagaaacaatctaaatatcaatcaatggtatgaggtttagataaattattatatattcatccagtagaatactgtaagtaatgaaaatgaatgactacagctatacagaatgagttgaatgaaccttcaaaaccccatgtcaataaaggaaaccaaatgcaaaacaatacatgccatttgattcaatcaatataaagttcaaaaaaaggcaaaacttctgggcatagtgtctcatgcctggaattccagcactttgggaggccaagccaggcagatcaccttaggtcaggagttcagttggagaccagcctggccaacaaggtgaaaccccatctttactaaaaatacaaaaattagctgggcgtagtggcaggtgcctgtaatcccagctactcagggggctgaggcaggagaatctcttgtagctgggcatagtggcaggtgcctgtaatcccagctactcagggggctgaggcaggagaatctcttgtagctgggcatagtggcaggtgcctgtaatcccagctactcaagaggctgaggcaggagaatctcttgaatctgggaggcggaggtagcagtgagctgagattgcaccagtgtactccagcatgggcaacagagcaagactctgtcaaaaaaaaaaaaaggcaaaactaaactatattatttgtggattattaaaaatataaagaaaagcatataaatgattgctttaaccctagaatagaggttacctctaggggaaggaggaagagagatgtgtactcacagtttctggtttgctgatagcattctgattcttgatgtggtggtagttcacagatgtaaccttcacaacaaattcttacacaatataatgatgttttaggaaatttttgatatatgctttattttacaatataaaaataaaataatgtgtgtcaatacctggcacatagtaaatgctcaatacataatcaattattatcataaatatataataattgtatttttaaagtactttgcattttacaaagtgtttttcatgaaaaacaggcattgttattattcctgtttcacagatgaaaaactaaggcttattcttgccacaacgcagctaaccaagaaggaacacagctggaagcacagctcgggtctgctgctttcaaatcccatctctcttctaggctttcctacctgccatgttgtttaaccaaggaaaatgagccaacagcctgatatgcaaaatctcattcataacagtgtttgtttagctgtgtgacttgagtcaaatgtccgtgtgtgtgtgtgtgtaagccttggttttcccttgggtcaaaggtgtatgcaggcttcctatttgctatagaacccaaagtgacagaaacaaacacatgttgtgaggtataaaatgctaaacatactcagtgagtgctgctttgatgtgcttttatctatactttgagtctgagcttattttaatactcagtgtaaaaccaacattgatgttaacagtttctcactcttcctcccaatgctcccacctatccaccaccaaaagaaataaataataaggagcctggtctaattgatgagttgaacatcaggaccaattataaccagactgcacaggaccaacacagccaagtgtaactgtaaacaatagaaagcatacatcttttcctcactgaaagttgataaaaagcattttcccattacatccgttggagagaagttaaagtgcacaaactgggaaattaagcttattttcaggctgttttaaccgaaaacaatctctaggcctatctcacatgtcttctgacaggagggcatccactaggaagattacgtctattatcaaggtgagcaatgaactttccatttacattagacttttataatctgatgaaagaaaggtacatttatctagtcttttaaaaaggaaaaggaaaccctacaaatctgtccattatacctgccgagaatctaaagtgaggtcaagacaaaagcagattacttttgatagtgttaataagagtttattgcaaggcctgtgagccagatctccctctgtggatttctgaatggctttaggagctgggctattcttagagtaatgagaaagagccttatctcactctataggaaattcaaagatccccatggcttcagaagccttactgatgcactttagcaaaactgaaagctagggtggttactatcacaaattcatgtacaatattagggatataaaaaaccctaagaggcataggcatgcagttcccaatatggtatattaataacagcaccccataaaaccctaatgggactgtggctgttgctatgactaaatttcgttttgaggcagtattagcagtagtattattagtaagttagggttattggttttcagtatcagacactgactctaatttagataacagggaatatattggaaaattattgagggctcaaagaattagtgagtggttgggtttgggaagaagtgggaaccaagagagtgacagagaacaggactcaggcagcaaagcaacagtctccttgtctattgcaataagaaaaccctagtcaggtagggtaccatctttattatgtacgacctatagtcactgtgttcttgggtgactggatcaaggtgtgaagttctaggaaagatcatctgattggctaagctcagatcataggtaacctcccttcccacaaaataaacttatataggggacaaaagcagatggaatatgacccatttcagcttcagcagtgggcatggagtacctgaaaatttctctgccaccaaggctacataagacgtctcactgaaagttcactaaagcctcgattttttgtctgactcaaatcctcagataaaaaagtcttgaaaaagaccttgattgccgttcctggaagagacacactaactgtccctatgtctgtccctcagttcccagtctcacattcttcactaaatataaacatactttatttttactcttagataatgaatgttttgagggcagagcatgcatcttcataagaagcccaggagatgcttggcttgtgaatgttttctctgaattgctggtgagtggaaacagtgggtccccactggacttttgccaggcactgcttcagaaggcttccccagactgatgaaaggatgcacatggatggcccggggcccagcccgtggttgggatcacgggttgtttagtgttaaaatccagtttttatgcactggcgcatgaaggaaaaatgaatcatttaaccccctcaacccctctttgtcccctcagctcgtgactccatccaccaccatcaagattgagagcactacataatgatgggagtgcctgaagccacgtctaagggtttgctttaggcttcatcctctttgtacttctgtcccattatcatcatcatcatcatcatcatcactaaatggttttcttcttcttaaagacatgcagcaagcactcaattaatgtccactatgaacaacattctatgccagatactaggctaagcattttaacatgaattatccaatttaatcctcataatgactacattaggcaagaactcctaccatttgtgactggtttgacagaggagcccagctttttcttgtttttcactatctgcttttttggagaggtatggcagagtgaggatagaaagtgcaaattcaggagccagcttgagttccaatctcactcccagtgcttactctctatgtgaccttggatcagatacttaacttctctgtgcttcagcttgttcttctataaatggagatagtaatagttcatactttataacagtatgtgttaaatgagcaaaagcactcagaaaattcccagtgtattacaagtattcaataaatgtttagagtggccatgtcaaccttcctcacatctacttaactccacacctcatgccccagtctcccctatcctgaaaagattccgatggcctgtaactgcaacccagttctggccagtagagaccaaaatgggtttgtgaagtagcccatctcatcaggaaagcccgtattcactttcaccttcacaaaaagcacaaggaaatcccttaggatgtttcagatgtcctctccataacattacagtatttttgttcattctccctcgtcagcacctgtctagagaatggctattttcgattacagatttgatgtcttaagcttgctttatttactttttattataaatttgactgcttaggattttctgttcttaatttcagacatttatatctcattttctttatgagaaaatctaggaattataggtttaatgccatggtaagtaatattaaaataaatagcaaggcatgaattggtaaattaaaacatctaataattggattggagaaatacaaaaactctggattcagtgaaccagcaccagtctaatttaaatgtctaattaaaagttatttggaggcacagcatacacgaactgcattgctgtcttcaatgactgggaatgaagcttggtaaccagaagaaaaattggaattgcatgaagaaatgggaatggagtgtaatatttaatcagagtactccatttttatcaaggcctgtccgactctacattccattaccacttcattaaaaaatatgctgtccccggtgctgaaactgctgtacttgtttaacagcagagcaaccaagcttcaagccagaaaaggaagtagcaatgccccagatggaggcaggagcttttgttagctaaagcactatttatccaaagttgctggagagctatggaagaagaaaaagaagaaggtttgtgattaggcaagtctagattggaagtgatttgacaagaacaagcctgccagtctgcaagctgattcatacagagggctattcatagcacagggctatttaacacattgtcaaatatgacattctagaaatatagcatgatcatttgtacaaatagctaatgaacagtgacatatttagattgcctacatagaggtggcagagtacatgcagctaggcaaaaagaactccatcatcgtatagcaaaaacagaaaatgtccaaaataaaactctaaaattagatttgtctccagagacttaccaattctggcactaccaatttgtcactgctacctttatctctctgctttattgtctataatatgggataacaactgtgtctactttttggccttgtgtgaaaatcaaattgatattaagtaggttaagatatataatgcaattaggacagtaaccaagaaagaactaagtccttaataaacatatattgctataagtattggtaatatatcaatgacaggtatttttcccaactaacagcatgtgaagtataagcgtttgtataaatattaccaaagcaaaacctgaatgctaagctgaacttttatttacagtgttaattacacgatgcttttatttctgtagaatggacaatagagtttcttcccctaaagatgtttcccatttttaagaggtcaaaagttggctccattttttcaaaaacctcttacttttctttccttctactttcttaatgtcctcaatttagttcattcattcattcctttattttaaaaatctcctatatcaagcccccttaataaactaggcactgtgctagactagatttctaaaagaagccaatcaaggaacttgaaggtcctctgtcattaataacaagagctactgtaaacacacaacctatagtacatttgtacattagcaaacacccaccccactccccacatacacacattaaacaggttttcattattatcccatgttacaggtgaggaaactgaggcttaaaagagggaggatctgccttaggcactgtgccataagggctgggggcaatgactaatctgtactcacacctcactgttgagtagcccacgtttaccgaggtgctgacctcttcctacctcccctttatcaggactgtgtaaagaaaacaattcgggataatttagagactaagatctcctagtgaaatacaaagttccatcttctccccacttcctgcagacactgtcaatagagcatgaactaagaaaaatctctgcagtcaaaatgcggtgagcgcagcagatgaattacctcttatctttagttctgcttcccttcctagtgaataaatgagtaaatcaatatatccctaggtcatatgcacctccttttactccaagcaagtgtttgtgttttgttttgttaaaaaaaaaaaaaactaagccacctaaagccattttcacagtttaccatctaacaaaacacagcagtggtaattaaaacaatctggggctagggaaagatggaaggaaaatctgtcaccaccgagactatcaaggagaaaaaagagtcctggggagcgaagcagaaacattgacaatttgttagatctaaccccagagtgacgcacagtgaaaggatgaggcagagattgttgctacaggaaatgtcagctttatgtgagaagcccgtggaagaacactgaataggtactcatagttttcatcttctgccaagtccaggaaaggactgggttttctttgtacaaataggaattaactctctgtctttattttcgtagactagttttggaaaggaataaccattctagtatactcacgctgtgtcagcttaaagtcaagtgttaaagagaaagtcaacccatatcctaactttaaattattttaagttttggtttaacttaattttaagaatgctgtctttcaagttcacagttagtttcctttttcttgttctgagatagttcaccaaactccccaccccactggctgaattcactcagacctctctctggggtaaaattgttcagtagctttcagcctccaacccgtacctgctagagtaaaaccagcaagaacaaccctgaaaaacttctgacccccactcttgttattctgaatctattttataggaaaagttttcctactggaggttttgagtactctacatcttacacagttgctgtcttaaggggaaactatttgccagaaatttgtgaattctcacacagtaagaaaaataatcattggatttggaacaattttactaacctcatttctcttactatgttggttaaaggacattgattggatgatgtaataacaatagcaacatcaacaatagtaatcacaaactcctgtgtgatcgtattctttatggtaaatgttatcattattttagtcttcaaagcaactctatgaagtaagggtaattgttatccctactctacaaacaggaaaacacccacattagttagaaatgattgatctacatcaatgttaaaaaaaaaaaaactaaagctttgttattgctgcctcccaaaaatgtgaatcatttaatttaccataacaaaatataagaataacatgaaatgtaggcttcttcatatcaaccagagatttctcaggggttttacattatttagaaatttattggtttttagctagtcagtcagataagagtggaacaataaattacaattttctatattatctttgtctagattcattttgaattgtctttaaacaacaattctagtccccccaaaacttatccacaacattaatatgtagaagttgaagaacagaaaatattaagggatggagacggaagaatatacattcaagaaataaaagaagtaatccctcagggagtgaggggagtgagattacacaagctttttcccctaaactgttcccaaattgtttgttataaaaagaaaaactaaagaaaaatgcaggggtgtgttatcttctcaaaggaattatatctacttctgagatgaggagtttatacctataaggactagaatctggagtaagaggcacctcttggatccctgcttcctctccttcaggttgtcactggtgatttggaagtgatcctttgttaccattggcattacccgaactttagccattcattccagcaccaaggtgagagacacatccaaagaacaccaggcagtgctgggcacaacaacattgaaacgtatattgcagagagagggggcccagccagagagagtgagaataatccaaggaggaagaggcaaatcatgaaacagagagaaaacaataaaaaccaggcacgtaatgaggcaagagcaaaaggctgggggatgcaactgtggaataaaatttgcagttcaggagcaaattttgcaattatgagagtccagtcaccaactgggcttgggtgtccttgaacatatcatagtctttgaccaaaggagcaagaaattctaacatctttaccattaccctcatttctcaaaggggattaacctgacctccccgttgattgttatttcaagaaaccaggctctaagaggtaaatcactgaaaacattttgtgctcacagaaagaatgaaaaggaagtgtttgtaagtagtaagagttgtagtaataatggcaacaattgcaacagtaatgatgatagtaataatagttgaaataattataaaaattacatttaatgagagcttaccatatgctttcgctgtgttgcatgcttattttagacaattcacttcatcttcacaactctgcttcactcattttgcagaagaagaaagtaagtctcagaggtaagtcatttgttgaaagacatagaattagcaggggctggagccaagattggaatcaaagtctgtctgaatatggagcttaagttaacttatatatccagaaagatggattagacatactgttctctatttcttctctaagtaaactaaaaatcctggatgtgacgtataaaacaaacaaaggagaactctgaaaggtgaataaaataaggcagataaactaggggccttagaacccatggaacaatgtggtggtgtgttctctggacttggatatgaaaaaggaagcaacctgaaaatgtcaatggacatagaaaacaagcaaacaaagcatttttcactagccaaaggaccaggaaggggaatcttagaaagaaagaaaattcctagaccataattatactattatagccaaagaacaaagaacaaactgtaaacccactcatggcagtaagtatattaaatgtaaattgtccaaatataccaattaaaagacaaggatgggaagagtggattcaaaatgtaactcaactatatgcggtctacaaaaaaaaagcacttcaaatataacaatataggtaggttaaaagtaaaagaatgagaaagatatataaatattaattaaaagaatacaagaatgtctatattaatatcagataacattatgtaatagaagagtcaatctgtcaagaagacataggaatcttaatgtgtatgcatcaagcaacagaattgcaaaatatgtgaagcataaactgatagaactgaaaggaaacagagatgtcccatgattatagttggtgacttcaacatccctctctcaacaattgatatttctgttctagagagaaaatcagcaaggatgtagaaaacctcaacaccaccattaaacagcaggatctaattgacatttatagaacaactcactcaacatagataaaattctggaccataaaacacacttgagcacatttgaaagaaataaaatcacacagaatagattcttataccttaaggaatcaaatacacattgataacaaaaagataagaataccttcaaatatctggaaactaaacaacacacttctaaataattcaagaattggagagaaactctcaaaggaaattaaaaaatacattgaactaaataaagaaatggaacatatcaaaatctatgggctatttttaaggcagttctgagagagaaatttacagcactaaatgtatatattcaaaaagatgaaaaagtctcaaactaataacccaagccacatcaataaactagaaaaaggataacaaaataaatccaacataagcagaagaaagtagttaataaagattagagcagaaaacaatggaattgaattgaaaacagagaaacaatacaggaaggtgaatgaaacaaagagcaggttattcgaaaagatcaataaaattgccaaacctctatcaggactgtatcagggttctccagagggacagaacaagtaggatatatggagggggatttgttaaggggaagtggctcataggatcacagaggcagagaagttttccaataggctgactgtaggctggagaacctgaaaagctggttgtgtggctcaaaactggtagcatggctcagcccaagtccaaaacctcagaaccaaagaagctgacagtgcaacctccagtcaggcccaaaagcccctgagaggccactgggaaaagtctcagagtcaaaacctgaagacgtagagtctgatgtccaaaggcaggagtaggaaaagccttctctctggaaaggagagagaaggcagagggagcaaatccgcattctctgcctgtctgttccaaatgggccttcagctaattggatggtgcctgaccatagtgaaggtgagtttgtttctcttaatccactgactcaaagatcaatgtctaccaaaaacacttgtacagacacatgaaaaacagtgcctcatcacccatgtaggcatccctcagtccagtcaaattgacacctgaaattaaccatcacaaaaactgaaaagaaaaagagaagacacaagcatatcagaaataacacagggaatatgaatacaacccaattctttgaaaaaaaaaactattacaaataactaaatataaaatgataatttggatagccctgtaactgttaagttagctaaattcataatttttaaaactttcaaaaaataaatttccaggctcagaaagatattttcactttaacaattcttccaaatcattaatgaacaaatagcatcaattttacataatctcttccaaaaaaagattttaagtgagtttaacaaggccacataacaaaagataaatagacaaaaatctattgtacttccatacactaccaataagcacatggacactgacatatgtaataccacttcaatttctcaaaaatgaaatatctaagtataaatctagcaacacatgtaaggaactcattttctgtaaactccaaaatactgattacatacaacaaataactataaaatggtgatacatacaatgtactgggtgagtcaacacagtaaagatgccagttctctccaaactggtgtacatctttaacacaactactattaaaatccaagcaaaaattttgtagatatggacaagataattctaacatccacatggaaaggtaaaataactagaaatagcttaaacaatttttaaaaagaagaatatagtgcaaggagtcagttttcctaatttcaggacgactacacacacccacactaatcaacactgtgtagtattggtaaagggatagacacatatgccaatggaacagaacagagaacccgaaaatagaaccacacaagcatgttcaattgattttttgacaaagatacaaaagttattcaattactcaatggaggaaagatagtcttttaaacaaatggtgatggagtaaatggacacacataggcaagaaaaagtaaacaagcatgccccttaaaaacccacacaagacaaggatgccatctctcacaactcatagtcaacacagtattggaatttcggcaagggtaatcaggcaacagtgagaaataaagggtatccaaataggaagagatgaagtcaaactatccctgtttgcagatgacatgatcctatatctagaagatcccattgtcttagcccaaaacattcttaagctgataaacaacttcagcaaagtatcatgatacaaaattagtggacaaaaatcactaacatttctatacaccaacaacaggccaaccaagagccaaatcatgagtaaactcctattcacaattgccacaaaaagaataaaatacctaggaatataactgaaaagggaggtgaaagatctctacaaggagaagtacaaaccactgctcaaataaatcagagatgaaacaaacaaatggaaaaacatttcatgctcatggataggaagactcattatcattaaaatgtccatactgcccaaagcaatttatagattcaacactattcccattgaactaccatttacattcttcacagaactacagaaaactattttaaaatgtatgtggaaccaaaaaaaggcctggatagccaaggcaatcccaaacaaaaagaagaaagctgaaggcatcattctaccccactttaaactatactgcaaggctacagtaaccaaaacagcatggtacttctgcaagaacagacacatagaccaatggaaccgaatagaggaccagaaataagacggtacatctacaaccatctcatctttgagaaacctgacaaaaacaaacaatagggaaatgattctctcttcaatcaatggtgttaggaataaatggctagccatatgcagaaaattgaaagtgaaacctttccttataccatataccaaaattaaatcatgatggattaaagacttaaatgtaaaaccccaaattataaaatccttggaagacaacctaggcaataccattcaggacacaggtatgagcaaagatttcatgacaaagacacccaaggtaattggaacaaaaaacaaaaattgacaagtgggatctaattaaactaaagactctctgcacagtaaaagaaactatcaacagagtaaacagacaacctccaggatggaaggaaaattttccaaactatgtatctggaaaaggtctaatatccagcatctataaggaatgtaaacaaagttacaaggaaaaaaaaacattaaaacgtgggcaggacatgaagagacacttctcaaaagaagacacacatgttgccaacaaccatgaagaaaagctcagcatcactgatcattagagaaatgcaagtcaaaaccacaatgagataccatctcataccagtcagaatgtctattatttaaaagtcaaaaaataacagatgctagcaatgttgtaaagaaaaaggaatgcttatacactgttggtggaagtgtaaattagttcaaccactgtcaaagacagtatggtgattcctcaacgacctgaagacagaaataccatttgacctagtgtcccattactgggtatatatccaaagtaatataaaccattctattataaatacacatgcatacatatgttcattgtagcactgttcacaacaacaaagaaatggaatcaacataaatgctcataaattatagactggataaagaaaatatggtacatggacaccatggaatacaatgcaaccataaaaagaatgagattatgtcctttgcagtaacatagatggagctggaagccattatccttagcaaactaatgcaggaacagaaaacccaatctcgcatgttcttataaatgggagctaaatattggacacatagaggggaaacaatacacacaggggcctctcagaaggtagagggtggaaggagagagaagatcaggaaaaataactaatgggcactatgcttaatacttgggtgattaaataatctgcataacaaaccccatggcacatgtttccctatgtagcaaacctgcacatgtgcccctgaatttaaaataaaagtttaaaaataaaaaataaattaaaaatttacaaaacaaaaaaagaacaaataaaaaaataaaacctggcacatgtttcacactatgtacaaaaagtaactcaaaacgtgtcatgagtttaaatgcaaaacataaaaaggtaaaatttagaaaaaaataaaataaaatatttccaatctagaactaggcaaaaagttcttacaattaacatcacaagcataatcaataaaagaaaaacttgacaaattgaactttatcaaaattaaaaactgctgatctgtaaaagactgtaaaataaaaagacaagctatagattattagaagaaaatattttcaattcacatatctggcaaataacttttatctaaaatgtatacagaatgcataaaactcagcagacaaaaagttagataattgggaaaagacataaagaggtattttactaaggaagatttgtagatggtaaataagcacatataaagatggtcaatatattagccattggggaaatgcaaactaaagccacaataagatattaccacacactatcagaatgattttttgttcttgttttgtttaagtgacaatgagaggtgaagctggctgggcttctgggtcaggtgaggacttggagaacttttctgtctagccaaaggattgtaaatgcaccaatcagcactctgtgtctagctaaaggattgtaaacacaccaatcagcactctgtaaaaacgcaccaatcagcgctctgtgtctagctaaagttttgtaaacacaccaatcagcactcggtaaaaacggaccaatcagcaccctgtaaaatggaccaatcagctatctgtaaaatggaccaatcagctctctttaaaatggaccaatcagcaggatgtgggtggggccaaataagggaatgaaagctggccacgccactggctggggtcctcttccgacgtgtggaagctttgatgttttgttcttgcaataaatcttactgctgctcactctttgggtccgcagcatttatgagctgtaacactgaccgcaaaggtctgcagcttcactcctgaagtcagcaagaccacgactccactgggaggaacgagtggaacgaacaactctggacgtactgcctttaagagctgtaatactgaccgggaaggtctgcagcttcattcctgaaatcagcgaggccacaaacccaccagaaggaagaaactccggacacgtccgaatatcagaaggaacaaactccggacgcaccatctttaagaattgtaacactcaccgcgagggtccgcagcttcattcttgaagtcagcaagaccaaggacccaccaattccagacacaccgccaccacatgctggcaaagatgtgcggaaactggatcactcatacattgcttatgcgtatgtaaaatagtacaaccacactggaaaacagttgtcgatgtctttaaaaactaaatatgcaattaccatataacccagcaatttctctcctggacatttattccacagaaatgaaaatgtgtttatacaaaaacctgaaagtgaatgttgatagcagctttattcataacagccaaaacagggaaacagctcagatgtcctccagtgggtcaatggtaaaacaaactgtgctacatgtgcataattattattactctctaataaaagggagaaggctgctgatgcacacagcaacctgaatgaatctccagagtaaaaaagcaaatcccaaaagttgcatatggtatgattctatttattcgacatacctgaagttacataatgctagagatggaaaacagaataaccattgcccagagttaagggagtggtgagacaggagagaagtgggtgtggctatgtaagggcacacaggagggagcctttagtgatggaaataccctatatctaaactgtatcaatgtcaatatcttgttatttcttacaagatgttgtaaaattcaatttcattgtaagatacatatgcttccacactaatctcagagtaaaaggtttaatttatttatttatttatttatttatttatttttgagatggagtcttggtctgttgcccaggctgaagtgcagtggcacaatcccggctcactgcaagctctgcctcccgggttcactccattctcctgcctcagcctccagagtagctgggactacaggtgccccccaccacccctggctaattttttatatttttagtagagacgaggtttcaccgtgttagccaggatggtcttgatctcctgacctcgtgatctgcctgcctcagcctcccaaagtgctgggattacaggcgtgagccaccgcacctggccaaaggtttaatttttttaagtcaaacataggcttgttggttacagctagtcttagaattgtacatgctcagttccaccatacgctgtaggggaaagatgtgcctctgtaggcttacttggcataggaaacagatgttccaccatctgtacagagaccatccttcaggctgcctacactctagtattccttccagacccagaaggttttgactcacgactgtattttgatctttcactcaccctaaatgtacatacaaattctaagtcatgtatacatacatacaagtgctaaatcatcataattcctattttcctctcaaataaagttttaaatcaggagtatgacactgccaaacactgagtgactatagcagcacatatgccacaacagccacaacagatggcttacatgtcatggtttctatccccaagttcttctgcctagtaaacctattagtaagcatgttacaaagaagtattatggaatcgggaggaaaagaaagcaggttttgttggctaatgagatctcagagaatgaaaaagtagcattccacaagggtacatatcaggtccaatattatagcatctagatccaaggactaagaatcctttgtggacattttgttactttgtttttgttttggtttgtttggtttggtttggtttcatttggttttgtttggcttgataagagggataaagaaggccacaaatgcttttgagaatccagtgaaagtctggacccacttccaacctccaaaaaaaatacacacatacacatttttcagttgattgaaactgtataatcactgctggaaccattttctctgacctgttttagagaaatgctcattcaagatatgataatgttcaaatgtccagataacaaatatcaaacacatctctaaaatccttgagctgatgatagccagatttgttcccagaatctttggagactgttattaattataaatatctccacgttattgcattgttttcttcccatattcaaagtgctgatcttccttacctgttcaggtccaccgaacatgcagacttaataaatgatgtcttgtcaatgccatgcattaattggctattgccataataatgctgtataatcaaccatctcaaaactgggtgtcttacaacaactagcatttcccaagtctgcaggtctgtatctggggtggctttggctgggctcagcaggcagttctgctttaagctaaacatcaggtagacttgacatggcttgggtttgagcatgatccaagtgtctcttgtatccttgggccaaaggctgcttagagaaggttctaatagtaaatgtcagaatagtgaaagacaaaccaagccacacagatccagttaaagcttccacttgcatcacatctgttaacattgcattggccaaagccaagtcatatgactgaacccagcatcaattaagtggccaaaaatgtctacagtggaataggagaatggatgtttgctgagcactaatataatacttcacaaatcacaaacaactttctagtatttcccaaggctctcatgatgccaggtgctctagtgaaatttcaccatactcaaatgactaaaacaagaaatcaaaaaatataattacagctgagaacattttgtatgactcaactatgttttagagcagggcttcttaaccttggcactattaacatttaggaatgcatacttctttgtttctgggagtaaggtggtgcagggggtggctgtgtggttcactgaagaatagttagccacattcctggcatctacctactagatgccaatagttctctcaagtgatactaaccaaaaatgtcttcaggcattgtcaagtgatccctgggggtcaaaattgtcagtgtttgagaaccacaatttaagaaaaatagtcaacatccaagatacaataaatattgtcaattgccaaatagaaaacatcagtaataaaatatatattcttggtatcagtataaaaaagtttgcattcaaataaaattgaccaggtatttttatatggtaggcattggcaaatccttcttaaatccttattaactactctgccagatgggtagcattatttcatgctattaaagttgaaaacaagctatagttaaatgaattgttcaaagccacaaagataaaaagagtaaaacttggatttgaaatttgatgtcttcaacttaaaatccgctttgagtaataacacatgctcttatagcatttataaaggctcctgattattataaccatttccactctgctttattgggtgtcccttttctataaagatgtgtgagaaccaaagagttcatagaaaataagccaatgttttatgtaataaataatttaacaatttatgtaatattatgtaatgtaataattaattataaaaagttcatagaaaacaaggtaaggtaagaacctcgagcagaacctaaaaacagatcttggaaagagcatactaggtgaatggccagtgaaatggcaagaacagagggcctgagttgggagtttgcttgttggcttataaaaataagccaaagttttatgtaatattttaattgagtgctctttattactgacatcacaaacactaaatgataaattatttataaagtcttcaaccactaagaatagtagttacatcatatgtacattataaagagtacttgttttcttatcaactaaacccacgatcatcatcatcatcattaaaagcataattttaaagtggaaatagtaccaatttaccttttttagctggtttatagaaagcatctcaaaaatcaaaacttctacccatgtgattctcattgtttggaatataacctctggggagctgtagaactatcttcgatgtctaagtttttgccacaactcactttgaatttatacaactccttcaaatccataagtggattattggataatccttcacaatatactgttggtcagacaatatttcactgctccaacaacccctgccttagttgaggccacactcttctttctcctagataattacagtagacctaactaatctccttccacctttgcctgctacagactattccccgtgcagcagccagagtgagcttttgtaaatataaatcaggaaatgttcatcacactcctactttgagcattccaatgggttcccaccacatttagaataaaactcaaattcctttccaaagtttgaaagacctaataagctggccaacagtaacatttctgcactcattcacagcttttttccccttcattcagtgttctgcagccactctgaccctgctattcctcaggcaaaacaagcaaactcccaactcaggccctctgttcttgccatttcactggccattcacctagtatgctctttccaagatctgtttttaggttctgctcaaggttcttaccttaccttgttttctctgcaaagcctttcctgacctttgtgaagaagcatctctcgactctacccaccccctcactttgttcttttatagcacctcttactaactggcatcatattgcacatgttttctgctcttttatttattaactgtctttcctattagaaggtaagccttacataggcaggaactatgttttgttcattattctatctccaggacctaggagcatacctggtatgttgtaggtcttcaataagtatatgatgagtaaatgatgaatgaaagctaaatattagctggagactcacaatatttggaaattgaggtaaggttttcttaagtggctctgccaccctaccactaccatcccctacacacctatagattccagaacgcttcccaaggcttctgagattctctaaagctttatgttttcagggcatctctagttctgacttcctgatttcttagtttgtgaatcatcttgtcatcctctccatgccgtctttgcctcacacaaaaaaataaccttctcatataaggcaacttgtgtttttggtaaactttaccaaagacttatagacaatctaaggtaggtttatactgagacattgtaaagaaaacctttagagtaaacaggaaacattcttcttcttatgaagactttagcctccaccctatagaagacatcactcatgggttctcctaagcccacagcaaacttctggcccccgctttaccccaccccccgcacccatcctctccagagttaaaacaaatttctctcttcacctcacacagagcaattcagtcttctcttttattgcctttgatctttctgtcatcatgcttcagggtctctctcttcccattccaagaagctcttcaagacattcttgaagacattcaagacattcaagaagacattcaagacattcaagaagacattcaagacattcttgatagacctattgcttctgtgactataagaggctctaatattccacatggccacaaaatactgccatctgaataaatataatatctaaccattcttcattcttctttttcacgtgtaaatatatgcaaacacccacacatacacacagatgcacatatatatgttattgtgattcataaaagaaaaataatcaggaagcatcactgaactcacatgaactcacagtaagtgttggtcatggagtattttgtcaattaatcagttctgaaagatcaattttaatcaggcagatatctataagacttcctgatgttaaaagcagttttctcatatttgaaaagactaatagcttactgcctgtacagtatctattttctcaaatagaacctgaaaattaagaatggaaagggacaaagatagccatccttgtagattctttttatgcttgtccaatattttcacctctgaaattcctacagggatgaagaaaatatagggactgtctgtttacctaaatgacatgggcatattgttaatgaataaagttatatgcagatcaatatttagtgtttcatctaaaaataagaatatgtttatattatcatttgcttgtgagacataaggtcttgcttaccctgcccactgcctggtagtacagggatacctaaaacttcaggaagtcgcagtcatggtggtggtgggagggctaatgcctaacattaccttgcacctaaattgctccagcaggattgtcacccaggccatcctgcattctttgctctattctaaatagttgagggcctctcactgtttgctgttgcatctgccatactatgttggatctttgggaagagttgacagctattcccacatcttctaaaatactgtttccagtatctcccatgttctgaaatattctattgaggcacatcactcattacttgccagtaaattcaattgtctaataagcatcttagatcccaaggccaagcatatatgccaatgaaatctcccctccttctagtatgacacggtatccctaataagtaaaaaaggctaagaccaattctgaatacctgaattcaatagtcttaacctctggtttgtagcttcagacactgactatggccaactccactcactgcttaggttcaccaatgaggaaaagggccactgacttgattgatccttatgactatacatgacacttttcaggctgggaaatgtagttcccctgagctgttatccccccatggatcaacagcctatccttttctacctgagttgaacaaaatctgagcccagggttcagacggtcaactagtcatttcaaattttcctacaacgtcttctaggaccctatgcatccctctggcccaagtgtgaaagaataatcctcctggtatatgcttgccaattaaggaccttcagaaagaagacacgaaaacaggagtagaagcttcagggatttattgaggtaaaaactgtgaaatataaaagggtgagagaaagcctttggaccattattcaggcctgatgccatgaatggagaagggagagaaaggaggataacacagaaagaggctacaactgtgatgcagctctgagaaagtcttaggcatcgcagtggggagctccaatgcaaagaatgactgtagaagagtctctcaataaatagaaaagcccagaccctagtccctccgcagcatgtagacaatgactggaggcagcttgggaacagtgtgctctcagctcagatgctgcaggagatcttgaaggtgctacagtaggctgttagctatttgcattcctttcagcagttttttcttgtagagatatctgagcaatgtacattcatggttgtcccagtaggcaacatagcactctataatcttggttgtggcctaattccgagatgggggataattgtgctgatgacataatataggatctgtcagacaccaaggccaagtagccaacaagatcccccatgcctcaaagatccagaaaattaacctaaattctaggctcatcttaaacaacataatttaattatcttttggccagatagggagcatcttagcctggaccaatgcaccacctgcatctgcatcagcaccagtggggagctggaacattcagtgccccatacatgggagcaggaagaaggattgtctagagctctcagcaacctggaacctgtcctctgggcttgggttgggctttctgagcctctctgttgggagagggcctcaggtgttactcatggctcccattttcttatttacatcataaccatagtccagtatctcctatagcaatactagagactagcctcatgatcttacagattaaaatgatatgggttcctgactgagagggtaattatgcaaagcatctgtccctgtgataaggggtgagctgagatataacgtttaattctattgattccctgtgggctggctcctcagaaaaggtaataacctctgtagggctccatgaaaattgtccgcttaaggcaattaatcctggaaaggactgaggtagaacacttggtcctgatgtagagcaattaactattgtcacatagcttcagccacaagatttggaccctagccctctgatggtgtcagtggaggggatccatgtaccccaccacctactggctggagacctaatcccgaaatctgacaactgacctttcaggatccttgtctgctatcccacagaataatgggggaccacacaggcactaacctgttatgtctctgtaagtttctctcccaataagtgtttttccagatcacctgttgtgtttgctatcaggtcattcacccttggttgctatgcagcttccccctgcatataaataaaccagcgtatggcacatgagaaatccacaaaagtggtagaccattgtggaaaaggagtagtgggttgatctgaacagaggtaaaaaaaagatttctcaatgtgtatatttgatgtttgaatgataaggatatgccatctattttttaaaaatatatataattaaaaggagaaaaggttaaatcaataactgctgggaaacaattattaaagtaaataatttaaataaatgtcataccgttttctgctccaaatttcttagcatggatttgaaaaggacattaacaaccacaaaaataaaacataccatgtgcaacaagacaaccatcccaacagtgaaagagcatcacaatggcgaaggagtggtgcatatgttttcttaaataacacattaggatgcaattttcactgaatctgaaaaagtttttaaactcagagagaaaaactaactaaaagtaagaaaaagttctactgcttaagagtggcagaaacctaaacatcacacagatatttccccctgttggaggttaggaagctgcaattcacattcttcctcctagctctttacagcctagttggagagacaggcaactaacaggtaagtaaaatgcagcgggatatacatgaaaaacaattcctgatagattgttgatatatgtgcgaaagagaaaaaaaaaagtctctagaaaaatgtgtccaaaactatcttgtctacttccaactagagatagttttcttaaacaaagcgaaagagtaatgaccatagaggaaacagctaatcaattggataacattaaaaataagaacttctgttcaccaaaagacacaattaaaagagtaagaaagtaagccacacagtgggaaactatatttttattacatgtacctgacaaatcactcctacaaattaataagaataaaaaagatgctccaatagataaatgagcaaaagacttcaactggtatttacaaaacaggacaactatatgaccaataaacatttgtaaagcacaaaaaggaaatgataaccacagtgaagacaccactatacaaccaccagaatgactcactactggcaatgcccattgttgacaataatgggaaacaattataatctacgtacactgtcagagagagcaaattagcaagatcattttggaaatttggggtagtatatacttaaagccagattcatgcctactgtacatttctcaaatatgtacccaagagaaatgagtgtatattttcaccaaaaggcaggagcataaaaatgttcagagcactattatttgcaaaaaccaaaatccagaaacaacacaaatgtctaaccacaggggaatgaatggacacatagtactttactcatacaatggaatactatgcaataatgaaaataaaagagctacagctacacacaacatggaaaaaattcacagacacactattgagtaagagaaatcagaaataaaagtatttatagtgcccaattccatttgtacgaagttctaaagcagacaaatgtaactataatattagaagtcaagattgatgattacttttgggaaagaggaattgtatggattggaagaaagccttaagaggtcttctgaggtcctggttatgttcagcttcttggcctgagtggtgatcatacgggtagcttcacttcaggataagtaagccatgcactatgagttatgcacttttctgcatgaatgctacatttaaatgagagagtttgaaagcaaataaagtgtaatgagtgctttgatagattttactgaggactcatgtgggaggaaaccctgacactgatttagatgactggggaaaagttcctggacagctacactgaatcctggaagactgataggagtgagctctgtcaatggcagtaaagagtactccaagaaaaaaaaaaaaagctggaggtgagagagattgtagtgccttccaggtactgcagctatttcttgtggctgaaacacagggctttggcgttatgagacaggagtaagaagagaagaaatgggagggctaagggagttgagattataaagggcctcctaagccttgttaggaagtttgggtttgctctttgagcaatcaagagttggtgttgaatagggagaaatatgattaggtgtgcatgtaaagtcatcagtgtagctataatagagtattgaggatagagatgagagcttctggaaaaaaatctaagctaaaggaaataaaatcagagagatagaaaggagtggaggctaataagggcatattttacagtaggctttggtatgtgattgactatgtggcatattccatattttagcctgaggtagatggataggtctaggacaatttccatattttagcctgtgccatcttctgagaggagaacacaaaaggacaaacggtttgggtgaaaatatggggttaattgaccagctataactggtacttctgcatgttaacaccacagtgagattctaaacaccccaaacagactcttattctttattgcacttttctaaatctcttagcagtttttataagtcatttcatttcagtccctcaataggctctaacatggtcagccaggcattattgttccacagacaatgacttcagcttgtagacttgtgcggccatttagagttggcaagccatgatgcaggacatggaagggtgaagttgaagctctactattattccttcagggccacattgaggaaccccagggaaagccactcttcaacaccatacctctcgctctgtggctcttgcctgcaccaacataaaggtcaaccaaagcaatgcattttatcatgttcaaatattaaaaaaaaaaaaaaagctcaagaaggctttattattgttgcatctgagaagcatctgtaacttatagaaaaccccaaaagaaccaccagtcaacttcctggactaacccagcccttgcttgctctcctctctagttgtctaagctaatctgagatgatccttggccctagcttgtggagctatgctaattttcgtggctactgaggcccagttcattgattttccatgagggtagctgtgttcagacaggtaggtggtgtggctatttgtccaatagcattaaaacaaactgattgacagcttcatctctttgtcatggacacccacatgccaagtattgtcaaacactgggaacactttggcatctcatgcttaatgtctcccattaacccacagatacagattaaggtgatgaatttcatgtcaactcattttatttatcacctctaagatgggctgttaaagaaccacagtggtcaaattgctcatatatctgccacaagccaaatagtcaggaaaactccgcaaagacctgacatttgaacattttctttccagagaagaaatagctgaacaatgccatgtctctgagtttaatacaaaatcaaatttaaaactaaacatttttctactaataaacagaaaagaatatattaagtgggaaacgttaatatcattggactatttgtttactgggtgatggtgtggaatgagagaagacgtataattatgggtcattttgtctaaaagaaaattcaaaatgaataagattcaaagacttaaatggaaaattaaaatgtctaagtgcagacattgaagccttaggaagcttactatctatgaacatgtcctccaaaacaaataattcaaggcttgccgccaaaatccatgctatttctacatttctactcgttgtttgaataggcatatggtacatgagtgaacctaagggaattaattttgtatcatctgtcacccataaacttatagtagaaacaaaattggaagccgggaaacagtttcatctgagactcggcaagtgataactggatcattgcccagtggatcattgcaggagactcgaggcaggacatggaaagagactgtcaccaagaagccattgatcagagggtggatgtacccaagggagaggcattagattccaaagagtaatttaactctccactttcatttgaagatgtccaagcacagaatgtacctctacatcactgtctagctggaaatgaccctgcttattatctagcctcatcctttcattttacagaggaagcatctaaggacagagacactgagaaatggagccaaggtcatatagccgttcagggggctgtgctatgaatagaactcaggacatcttgagtttgtatttgccaatctttctagtacctgtgccttatgcattacagtcactgaccccataaatctttactgaacatcatgtgtgattaaggtgctgtgctagatgccacgagaatgatttaacactgcctgtcctcatttggatcaaataaattaactggtctttaccaaccagtgtgtggtccactgggaatttaacatcactgagacttattcattcatggcattcctctccaaagatgacacttctctaaatgcacaaacatgtttgggtgagtgtcccttccatgacacagatctgtaccttctaggatacaaagtgggcaaagtttatctgcactggcacctcctatttgataaaaacacaacaggccggctctcttttcatttggggaaacagagctgcttcctagcaggcttcatgaggtcatgatgttctagagtgtttattgccaaataaatttttctgacctcaatactcatgcttggccatatttatgtagcagcatctcaacccttgggccatactgcttcagcttacctataaggaggacatgaaggaatgtgtgaaacaaacactgggtcaagggtaagacctgaaagagcacagtaagcctgatcacctcgacatatcacagctattaaatccttctattacactattaaatatttagggaatcttgtcattacattgttaaatatgcttccatttttttaagcactgccctctccgtttaaatgcaaatacctctgaaagggttagtacaccaaacttttaatttagatcattagaatttgcttctcctcaataggagggagcagtgaattaaggaccaaggacacccgtggcagggatggagtagtcactgtgataacctcagacgtgtctaattctgtaaaactaggattcggatctcaaggagcagcaattctgtactaagaaattggttctgtgcagccttctctgggggtgataataaccataatcatcatcataatcattaaggcaactgatatttattgggggcttattatgttccagacacttagctgagagcatgatactattgaggccacagacaggttcgtttgagaatcttaaatcttcacttatgacccctgccagcctgccaaaagactatgagcagatcttagtatacacctctttcttttacctgtagaccaggagtactcattttctcttttgtggaattaccgagataaaatatattcattgtaaatattggttactcatttagctggtatgaggttatgcctggacaagaaataccactttccttgactatcacaattcaagcatggatcttagagccaaactgctcaggttagaatcctggctgtgtgtcctcagcttccccatctgtaaattggggtgtaaaatgccactgcataaggttttcatgacaattaaatgagttaacatatgtaaagtggctggcacatagtatgtgagcctaagggctagctcttattattacattatcattatgccaaaatattgactatgtagagtcttggcataatgaaggatgcagagctgtggacagagaggatgtctttgctctcaggctttagatcttccccttagtcaatgagacttttcaagccaaatggcctcaattgtctatcagccacacggtggatccaggaacccccctgcaaggctgtccaggacctctccaaactgtgcagcatggccactttctcttcaaggctttgccagttttcagaagcatttctgggagggcagctacagaccctcctcactatttttccctgttctcattcatgaaaaaaggaaaatgcttttctagtctaaagatggaagaaagatctggtcatctgtatttttcttaactgtgaatgtttaatttttcctagaagtctagggtttaggacacaaaagcctgggagatctgcaggctatttctggtttccaggccctgccttaggcatccctcctctgaagcaactgccacccgcatgatgggggaaaattcagtgaaaaaagaaaagaagaaaggtgaatatctccatacattattctaccctacttaaacaagaggctgtttcttaaatatgtaattgcgagtatcagcacctcagtagaaagtcaggttcccactgcttgttcagtcctgagagcccctgaacactgccctcttgccattgctgtcttttattctgtgtccagcattggaccctgaagtctgtccagaataggaaatcagagtccggtgtgttgcaggtgctgaggggacacatgcatccgtttccatccctggtaagtgcctggtaagtttctgcagacccgggaatcccacttctcaaattggcccccgactgctcagccacattatcaatccctcctgctaccatcagcaaatgaggacggggaatgattccagctatgaactggactcctggcaggtttgaattctaggaaggtctggttgctgctgactccaactttggtagaagtcaagagaccattccttgcttcagccaagaaacagagttcaagtaaacctgaagccccactctttatttcctgtcgagacactccctctatcaggggtgtgtgtgtgtgtgtgtgtgtgtgtgtgtgtgtgtgtgtgttacaggtctgagtctgatgttgaaggttgaaatccacagaacatctggctgctggggagggaggatggctagaaggtgagggaggacaagaacaaactggaaactcacaaacgtgagctggagaccacagaaatggactgaaaccaacctcagttctcatttcttctgaccttggtcagcttcctaagacaaaggaaggacagggaatggatctgaagggacaaagggaaatcactgggcttcttaaatcggttaattctttttaggaatcatcagatataaacgactgaagggtacatagtggccggagcagcaaagctgcagaaatatctgaagctgtcacagcagcaaaaagcaggaggtaaggacacagttcagtctgacataactgcccctatcctcagcagtattgcaagataccttacaatgcagaaaaaggctagggccatatctaaattttaggtagaaattgatgatggatgtttcctgcaagctgacataaatgttattactcttttgctctaacgctttggaagccacagggaaattgcagaataaaacaagttttaggctcttgagtcatctgccaatctcctggcagatatctttacatctcagagctgccccaaagcagtagcattatttttatgtatgcacatataaagaggcataaaaataacacaaacataaaaatagtgctgtggcccatcagccatgtggctcatctttggggttattctaaccatgctgttcatccgcattgactcacgcttcagagagaatatctggaaaaggagtgggcagagcagcctgagatccttagactttacagagtggctgtgacccacccagaaaataagccatttccctcaaataaattgagtgctgtaaaagaaagaaaataacccttccagacccatgaaggcaaatcaggatgataggagagaataaaacaaaacagaaaagcatatcaggtgctaatgtgtgtgtgtgcgtgtgtgtgtgtatatatatatatatatatatacacatacgcacatgcatacatatacatacatgtatatatatacatacacacacgcatatatatacacacacacacgcatatatatacacacatgtatatatatatgcacacacgtacacacacacatacatagagagacagtgagagagagaggacagagagaaagagatacagtatgataaacgctaagaaaaaagaggaagtacagtagtgctggggtatagggaccaccaattctgccttggagaaatatatatatatatatatgttcctgaaatataataggctgaaacatatatataagcctgaaacataacgggctttcaataaatatttgctgaatttttcatttttgttgttatatacactaagtataaaatagagtgctaaactgaaaattctcaggcgtcaaaccctcagagtgggaaaagcctgttgcctgcagtccctgaacaagaatccaggtagaggtggcctagtaaggtttgcccagcactttcctagagaccgctgatggaaataaatggtgacctttcccagacaacattgccatatgagatgactagatggtgacctttccccgacaacattgccatataagatgactagaaacgtgctaggcccctgccacagatcagggtccatccaatccagagctatgccctgctatgatgacagtgctttgttcctggaagaatatgaaagcctctgccaccttgatttcaccctgtgacactgatcactctgagctgcaggtgctcaatgtttggttggaacatgtcacttttcgtatttatttctctttctgtctcctgtgcaaacccttttttgtttatggaaatcaggcctggactgagagaataaaggaagactgacttttcattctatatctatcctttttttttaagttgttttaaaactttttcctgtgaattgtataacattttcaattaaaaaatgagtttaaaagaccaaaaatctacatgttgctttccaccagtcttcctaccaatattattagcaagcgctagacccaagcacgacttgcagccggctgggaagatttgctttgattccagcctctgactcaatcccatttttgctacaaagtagggcaacgagatatagcagcaggactggcctcctttgctgcatttattccagagctgcatgactgtgagtttctttaactgcagaaggcctagtgcacaggacacagctctgtgtggcccccctgtggagttattctctgaccccctgtccgaggttgggtaagaggaatggatatgaaaggctaaacttatttggcctgtgctttcaacacctgtgtagcaatcctcttacccaatatattgagtagacagaagcaaaaggatagtcaattataatacgacagcccattctttcatcagatccagaattctcacagctttctatttcaactgacatttgttcctttttaaataaagaccttgtgcaagctttatgaatatttttaattaatagatgccttcatcaaacacaagaataattaactgttaaactcaccagagagccccctaaaattagactgattatctggaccataatttgctttttcaacaccacagggcacccccaggactccaaatgcttcggtaactcccccacatgcctttgctcagggcatctgaatcctgctctgctccctcccttctagaagtgcaccttcctttctcctagcttgtgacttctctgcttatttgacctctctccttctccaaaaattgtaatgaacacagctctcttctctgctttggtgctcagctgcaacctctgcatggagagcaattatggagtagaaggaagcaggatggatcatttggagttggtcacaagaagccagaagagaaagtggagaaacaaaaagtgaaggaaagtgaaggcaaatgttttctccagctggcaaaaatactttaggaaaattggccctgatttagactgtgtgaaggcaggtcttgcctttcataacaaaaatcaaggccatcttctgagagtcaaatcaattgaagttggttcttcttgaaataaagaccttatgcaggctcatttttatgtaaatatttttaattaatagatgccttcatcaaacacaagaagaattaagcattaacactcaccagagactctgaaattagattgattatctgcatcttaatttgcttttttgacattactaatttatttttaatagttctgtaatttagctttatctatttcttattctgcttgacagatccaagtgcctgcagctcaccagtcagcctctataatctttaggtactgctgtcagcacagtatattaatttttaaattatccagccagtgtgaggaagaacatcaattaatttccatatgggaatcaagctaacatctctttcccctccccagtaatggtgaaatttaaatgaaggagagggccaactgcaaggataatctagataaagataggaaattctcactcttatattacagaatctgctgcccttgaaatgccttccatttgaatcagtgccttaaaatcattattgtagtgaaaataaatgttcctttgctgctacctgttatccatagagtaagtcatggaaaagcaggggatggagggcagggacctgtaatattatgttcatggaaatatcccaggcacctagaacgatgtctagatgcagtaggcatccaataaatacttgttacaatacatttacaaaaacactagattgtgtatctagcaaacactgctgatgctctctgaagctgaaacaaacttgattcataacatgtaaagtggagacagtagacacaggatggttttcagcaacaagcaaggacaagcaaaatcagacaaaagagaatcacctaaattgccatgacaaatgaatgaaaagcagggaatgtttacttctttgcaagggatcatttagaaccatcatttgttttcacggacatgatagatgatagatagatagatagatagatagatagatagatagatagatagatagatagacagacagacagatagatagatagataacacattgaatgaggtgagcagagatttgatatgacttatttggagagagtaattgtgagagtctatggtaggcaaaccacatgtaagaaattggcttaattctgaccctgaaatttagacagggcattgataaacaggtggcctccagaggggcagatgaaaatgggagggcatatggagaaaggctgcagtatctggcaatgtttagtgtaaaggaaagatctaaagggccaatggcatctatattgaacaagagggaagaactggatcaatgaaaacagatatttattccagcataaaaatatttaaagcaaatgaaagtgacccaaggctgccattccagcatagactctcaatgcttctcatctgcacagctggattagactctttcttcgccttcctaccttctgactccctgatcccaatccatcccagtccatccctgccactagtgtcagcctggtatttctaaagcacgacatccactgcatcccatccaagctcaaaatctcttcagtggcttccaacttcttgtgttgaaccagattcaaatttctgagtcaggcattgaaggatagctgcagtagggcctcaatttacctttccagggatcctccacataccacacatgcacatctttcccccagctaagccaaagaaactcacttgtcttcaaaccaacattatgacccctgcaaacatcagccctgtgtttcatgtgtaatctctctgtgtgtcgtgatccctgagcatctcaggttgtcaaaaatctctccacttttcaaaggaccttttccatttgtttccatttctgatgagatgaacactttattagtcaaaaaaaatttaccagaatttctctctaaaaggaagctccctttgtttttggaaaaccccttagaaacctcatggggtcagaagcaagagcagaaaagcagaatcccaaatcaaaaagtggaatgactgagtgtctgtgcatggaaaaaaaggtaaacaacagagttatttatgcagggtaaattagaactgtaagatttgcatgctgaaatcacggctgctatgtggcccttagattggagtatgaatagagagggcagttgcattaatccagatgaatatcatgaaggcacagccatgggcatgctagtagagagggtgagaaatggtcaggttgaaggcatttattagacagatccatcaggttcactgatgatcatatgtgggaaggggatgaattatggctaaacacctcaatctctgtcttgagaaatggggtggttggttgttagagccaaaactgagatcagcaacaatgggcttgggggaggtggaaatcaaacattgcattttggatggttgtctcagatgtctgtgaaacatctacatggaaatatgaaacaggcaattggataagtaagataaaagtctaaaggaaagatgtagtttagataaacacaattaggagctattattataagactacgtaaaattataaaaatggattagatgacatagggaagggaagaaaagaaagaaaaaagattctagctcagttcttagtctttagaaatcctagaattggggttgaatgaaagcaagggaatctttaatggggacagaggaaatgcagcccaaaaggaagtgggcattcaggaggcgtaatgtccacaggcaggaaaatgggagactctcccaggagaagtgagtgctaaccatctcaagtattactaagaaaccaaatagcatgtgaacataaagtcagtcttacctcaataaagcttctaatttacttaaatatttttgaaagcacgaggagattgaatgctgaacttcgagggcaggacttagcctttgataggagtatgaactctttttccaagatgataagagagagaagatggatacacttagagatccataagtctccacagagcatgatgtccctgcaagcagcagctctctgagataggaagcagttagtgatctcattgccacatgagtccaacacctgcagtccccttgactctgaactccagcaacagtacattggcatgcctttcatggcagcaatttttgaatttgtctacaagaatgtacattccttgagggaataaacagcacttctctacattttgtgcagcacctaacattgtatctagcttggaagtctttaatttgtgctttccacttgagatcctgattttttttttgaaacattgctgaaaatttcctagcatcatcaatatgttataaaagatagaagaacctgacccagaaattagtaaaatcacaaatgagttagtctataaatatattacttttctaatttaattagtaaaatcacaaatgagttagtctataaatatgttacttttctaatttaaggtgaaaatcctcacacaagctaaagaaaaattaaagggattagttacacaagggatgggactatttgatagtggagtagggattggttaagagaaaagctcaaagctgatctcagtctttcctctgaactgaagattataagaggagcatgccagaaaccaaagccatagtgtttacagaaaatgtattttaaaataatttactccagggcttgaaatggaaatgctcatttgcaacacaaagatctggagttccaggagcagtttgtgtcagatgatgttgcatttacatctcatgcagagtaacttaccatagcctttcattcagagcatattaaccagtttacagtcttaagagtggcaaagtaatcttgggatttataggagagtcttatccaaaataaatgaggccggaggtaagaggaagacttagcaagaaggctagaaagaactaaaaaaatggagacatcaagcaagcaagtctaagctattttaacatagtcttgaatgtagaaggatgtggcagtcagaccaagtaggaaggggcaccagagacatttgagaagtgaccaaggggttacttcagtttctgatcacaaatctcacaccttgtgttttccttgcaaggtaacttgcaattccttaactcatcactttaaaaaaacaaacaaacaaaccaacaaaaaaagcggtcatctgagccctcacttcctccatccagaaaagtctcttttgccatgtttccctcagttcttaacaatggaggtttcagataatgcttttggttttccagtgcactggggaccactaatgcctgctctgccagatgagtttgcagactctgtggaacacgggagccacctaaattatccctcttggaagagatcacagaactcacagaaaatacttggaatattagaatccagaaccttccttccagaatacacaaagccctagtccaactcactcatttttcaaaggagaaaaattgagatactatgtgagttgcacagctagctatgtgcaaaaccaagacaagaatgagtaatccagcatgatgccatggatcaatttctcaccctgagcctcaacttctccattggtaagtagagataataatgatcattttgctgggtggcagggaacaaaataattgatgtatgtaaaatacctaccacagtgattggcttgattgacacgtagcagaagttcaaaaaattggtctcttctctttctccctttcttgtacccacaacacaatgcattacttaatgctatgagaaacaacagattaaagaacacacaaaccttttgccagtttcaagaacacctagagaaggaaattttcagcatccactacatctcaaatcagtatgtttctgtatgttctatccacagttagactgttaaatagcttagaagtgttttatgttgcttcttacatatgcttcacctttcctagcatcttctctcacagctgtgataccctaggaggctcaggaggcatgggataagagcttgtgtctctcaggctttcatcagcaccctcaatgtgacccattctctctacagcaagagaagaaaggttgttcctcttcagatgagaactgaatttgcttgtctctgcagctcctcaggatttagaagaatgaatgttcagtggcaatcagcagcccatatagacccactagaaacttagatatttctatatggtcaattgaaatagcagcaaagtgagagatgttttctatctatatgttttggcggaaaaaaatgaagaaaagagaagtggatgggcaagaactaggaaaatggggatcctgaagtatgcacaaggtacagaaagtcaattttgtctctctccacctaatcagtcgtttcacatcttgaatagatagttcccaaaatgttaatcatcacattagcttccctctaaatcctggctactaccatcctatcttttttaatcctgaaaaatataaaagcattaatattccagagaaaaaatattaataattgcttatatagtttaattcaggttaagcttgttttctatgaggaatcacaaaagttctactgcgaggatccaagcacacacacaaaaaaactctaagagacaagagttaaaatctctcatttcagctgagttgtaatttaaaaaaaaaaaagaaaaagaaggagaagaagaaaagaaagttttacaaagattatttaagtttcacggaaggcatattggcatcaggtatgtctggttttcatctaacttgaaaaagccttcgatttcaaaaatgaaactatgcaaatgattagttagtcattttgtgtaaatgctttaggatttagatgttactgtggaaaataaagtaaaacaaaacagctttagtacagccccagtaagcttagtccatggacagcacattaaatcctgaattaaacactccaccaaactcttcctaatgagccatccaagtctctgatgtatataatatacctttttaaaaatgcatgaatacatattccacccagagttttggatggctcctttgggttatttaagtttcaaaggagtccatcagtatcccaggtataacattctataaatgccttaaaaatgaaaattcagaaattagaagctcaaaataccttgaaggggagcaatgtattaggaaaaaaaaaaacaggccattcaaaggcaaggttgatgaggcatctgcctcccagaatttcctatctctgtcagtttgggtcacaacccttaaaacagctgtaactgtgttccttccaatctaattatacaactcttggatagctttgtttataattcgaatccaataacctcccctgactcttctctgggctgctgttacatggctactcttggatgctagcatgcaattgtagagactgagcaaggagggataggctgctcaaagcactgggatggagtccccacaggctcttcttcaaagaatgtgaaggttggtgcatcccagcctaaggaagttggtgagtccagaaaggaaatacttgtgggtagagaagagtgaagaaatcacaacagaggcttacagacaagaagcagatgtcatctttcttccagggaggcacaagaaataaacagtggatgacttagcaagcaagatgagtcaggagggagaagagagggcatttgggagaatgaaggaacaagtaggagtagatcagcattagctgggcaaattcattgtgcctatgaattcatttagcctcattgcaactctgacggatagctgggattagttttattctacagaggaggtaactgcattccagggagatttggaaatctccatgaaatcacacagctaacaagggatagagccagaactcacccccaggacaagatgactccagagcctgtaggctgtggtcctgctgtctagtgaaggatgtatactgaaactgattccagggactgtggaaatgggaaggggtgtctggaggaacctagaagagctataccaaaatctgtccaacacaatctgactgcccacctgcagtgtgtttcctcaagtgtaaaaatataaatcccacttcctagggttgtggtaaggatttaaaaagttagcatatgcaatgcacatggcacatatacctggcacattgaaagtatccaatgagtgggagctgtttatttttatgttgcttgcctaatgattcattttaccacatctgcttgtagagagatttatgttatggttccatagctgtctgtacatgagagcaagtatttgatagtgtttcaagattctataaatcctactcagaattttttccagtagtagagaaataagtgatgatgagctaagtgtgacttgaacagatcaacctggagagaacattgtggatcatgacctaagtttaacaaagtaagacctggaaagctagttaattccaaaggttgaagttgaacatagaagcacatttgtcattgctgtgtaatttagatctttaaataactgataaaaagtaaatctcaactttcatacaaggacaaaggaaggaatagctcactgaatctgatgatgccaccatttagcacaagtggacttggtggcttggaagagtcagctgacttgtcccacacgtcagaaccaagtctggacttcccacatctagtatctggatgcattgttcattcaactatgccagagtcctagcagtgttgatggtcatgctaaaacacatctagacctgacacattctccttgtagtcaatgatgcggtaagatgatgcagatttttcatggcaccagtaagtgaaccagatggtcagtcaaaaatgacatgcccagcctccagaatcatcatttccaaaattacggggatactgattggcaaagaaactaaacacttatcatgtcctcttagaactcttgctcccacaagtacagaagaaaagttaagaggtgacttcctgccacagcataattcctgggtggagagatgatgggaggagtggggagagtggtcacacatcttttgtcagttgcaagcctgatccctgctaggatgcaaacccctacagaatgaacctctgtgaactccactcattcccccttttacttcccctcaatttttctccgctctttttcaagactcttctcctctctctaaagaagatgttttatttgcaacaacatggatggaactagagatcactatgttaagtgaaataagccaggcacagaaagacaaaacatcctatggtctcatttatttgtgaaatctaaaaatcaaaacaattatattcatggagatagagagtaaaagaatggttactagaggctgggaagtgtagtgggggtatggggtaaaggtggggatgattaataagtattaaaaacagaaagaagtaaaacctactatttgatagcacaacagtgtgactacagtcagtaataacttaattatacattttaaaataactaaaagagtataattagattgtaatgtgaagtataaatgcttgaggggatggataccccattctccatggtgtgattattacacattgcatgcctgtatcaaaacatctcatgtacccccaaaatatatacacctactatgtacccacaaaaattaaaaattaaaaaaaagattttaggttaagatttaaagataagaaggaaagtaaaaaaggagtcttctattttatgtttatttgttttttcaaatcctaagcctggacaaaggctaggtaccatttcttcaagttacactcactatctcagatagtcccagcaagaaggggtgggcttttcatgcatctcagaggtatgcagttatccaaccactgtgtgctggcactgcagtgggtataatgggtaacaagagaaggccaagacatagtcacagccaggttgggagaaaaggaaaagtaactatgaaggtttttcttgtaaggctgatctgatctaattataaaattctgacacaaagaagcccaggctacaagtgctatactaaaaaaaaaaaaaatagtggggaaggggttaggggttctttcctttaaatgtattccctaatgtcaatggaattagttgaaattcctaataactgcagatgtcaacctctttccccagagactgtgctcttcatttgggcttatgtctctgttggccctgccttacccttctgggttgtaaggtgctttactaagctcttggtactagcccaaccagaatggttccctgggttctgagaagtcctgccccaagtgtccccctgatgcttgaaatcctatcagggaggatggagaaattttacacacaaatgtcctcatgagtggcagttcagtgacttcaatccatacagtccaaatgacagagagaaaagatacctgccagatgcagagttttaaggaaatcaaagaaagtcggtatgtgggagaaagatacaaaaggagagggcagagccattcagagaaacgtcatctcgtggctaaggtgacacttgactttcctcaggatgctgactagttctcccacctgctttgcctatccagattttgttctgggtgaaactgacttacccatttcctccaattggatcatctcagccacaatcccagcaccagcctccactatgagagtgggaatgggtaggtctttagaaaaaagggaactcaggctgagttgtttgtcagtcttcttggctttgttgtttgtgtggtctcaactttaatttggattgagttttctttctctttctcttttgggcataaggctttctgcccaaaatgaagtgttttgaagcacatcccagcctgttctgaattataaaagattgagttaattaaccttcccccagttgattactttcaacctttttgttggcacattgggaaaatgtattagcggttactaattaaaggtattgaatatacctttatacttcttcaaattcttggactcctgagctaagttgattaagaagaaaggggaaaagtttatgttgaatttatctttgaaaatagctagaagagactacaaataaaccaagaaaagggaagttgtgaccttatttttaacctcttcgtccctatagttttgggactatttttaagaataatagctaatgatttttaagtgcttatcacacacaagaaccataataaaagcttgcatgtaacatctcatttaaatttctctattctctgagatagatatgaattccagtcccatattacagatgagtaaattagtttagaagtcaagcaaattgcccaagatcacaaaggtagtacacgccagaggcataatgtaatgttggtggtttgtctctaaagacaacgcatttaatctcaacagcgttgacctaaatgatgatgtaatcatagtttttggagttggaaacctaaatgcctgcttgtaatttcgaagttcatcatattttcttataactcctttctgcattggttatttagtgttgcataacaaattatcccaaacatttattatcccacacagctacagcactcaggaatccaggagcagctcagctgggtgggtctggttcagggtccccgtgaggttgaagtcaagctggtagccagggctgcaggcatctttaggctccactgtggctggagtatctgcttccaggctcactcatgcagttgttgacaggtgtcagctcttcactgacttttggccagagactcaaattcttcaccatgtgggcctcaccataggcagcctgaatgtcctcatgacatgatagctgcattctcccagatcaagtgacccaagaggtataaaggtcatgatggaagctgaagttcttcacagcttaatctcaaagctaagacagggaatttattttgaaaagtgatttcaggtaacaggagtggaggactgggaagaataaaatatgagaggagggaaagtcatccaagcggtaattattgagctgggcaactgggcttcatcaactggggatggagtcctctgggagtctgtgtaaagtatgcctagaattatccacctaaaaacagaagagtatgtatttatccaaaagatcctgtcccccagtgatcaagggtgggctcagggagtagtgacaatcaggcagacagcaagagatgtggtgagttgccaagtgtacttgggttgtgtttgaatgcagcatgtgtccacagcaatgaccagagcaaaaagttgggatgggacaatgtacatgtctaatatatatgcattaatcccaattaaggctagagacaaggcctcatttatttttgtaccttagtgcataaactagagtctagtagctggcaaatctgtgccatcccatgtaatcagtctggaggcccttaatttattcaacacataggtactgtacacatactatgagatagacaccatgcaatacactgatagtcctgttggagcaatttacaaaaatatttaataaccagtattacacagataataaaatgcacaccaacccttcccaggcagtagggttaccctggaatatgctttcttaattcaaatccggagatagttgagtaatgagccataaacttcatttttaccgcgtgtcaaagagataggtctgtttggatttggggatggagtatgaaggaaggagatgttttagggtgacttcaagagaggggagtgagaatgatcgttgaataaagaaggaaaaggcatttccagggtgggaggaaggatggggagaaaatgcacatgaaagcacagatcaaccatgtaaaaatgaatggacctccctttatgtagctgagagtcaagctgggaaacaaatactaaattaaaaagtgtcagaatcaccaagtatcaatgtaaagaagtgcaaagtatttttaaaaaaaagcatataaaagtagggtatttggggccatattaaaaatgtaaacttcaatctaaggagtcatagaaagaaaagctttattctttgctatagtctggatgctgagcttctggaagagctgttcagaaatgtttattgatcaaataaataaatagaatctaaactgctcatcttaaaaagaggaaactggccaggcgctgtggctcatgcctgtaatcccagcactttgagaggccgaggcaggcggatcacttgaggtcaggagttcaagactagcctggccaacatggtgaaaccttgtctctaataaaataaaaataattagctgggcatgatggcgggtgcctgtaatcccagctactcaggaagctgagacaggagaatcgcttgaacctgggagatggtggttgtggtgagccgagatcgcaccactccagccagggaggctgagtgagactctgtctcaaaaaacaaacaaacaaacaaacaaaaaagagga
